(19) United States
(12) Patent Application Publication
(10) Pub. No.: US 2026/0167991 A1
(43) Pub. Date: Jun. 18, 2026

(54) LIVER DETARGETED CAPSIDS

(71) Applicant: KATE THERAPEUTICS, INC., San Diego, CA (US)

(72) Inventors: Sharif TABEBORDBAR, San Diego, CA (US); Saurav SESHADRI, San Diego, CA (US); Simon YE, San Diego, CA (US)

(21) Appl. No.: 19/406,703

(22) Filed: Dec. 2, 2025

Related U.S. Application Data
(63) Continuation of application No. PCT/US2024/044341, filed on Aug. 29, 2024.
(60) Provisional application No. 63/585,343, filed on Sep. 26, 2023.
(60) Provisional application No. 63/644,785, filed on May 9, 2024.

(51) Int. Cl. C12N 15/86

(52) U.S. Cl. CPC C12N 15/86; C12N 2750/14143

(57) ABSTRACT

The present invention provides novel capsid variants for viral vectors that detarget liver tissue and effectively transduce muscle tissue at the same time.

### RELATED APPLICATIONS

[0001] This application is a continuation of International Application No. PCT/US2024/044341, filed Aug. 29, 2024, which claims the benefit of U.S. Provisional Application No. 63/644,785, filed May 9, 2024, and U.S. Provisional Application No. 63/585,343, filed Sep. 26, 2023, the entire contents of each of which are incorporated herein by reference in their entirety.

### FIELD OF DISCLOSURE

[0002] This disclosure relates to viral capsids.

### SEQUENCE LISTING

[0003] The instant application contains a Sequence Listing which has been submitted electronically in XML format and is hereby incorporated by reference in its entirety. Said XML copy, created on Dec. 1, 2025, is named KATE-024-01WO-ST26.XML and is 3,141,632 bytes in size.

### BACKGROUND

[0004] Recombinant AAVs (rAAVs) are the most commonly used delivery vehicles for gene therapy and gene editing. Nonetheless, rAAVs that contain natural capsid variants have limited cell tropism. Indeed, rAAVs used today mainly infect the liver after systemic delivery. Further, the transduction efficiency of conventional rAAVs in other cell-types, tissues, and organs by these conventional rAAVs with natural capsid variants is limited. Therefore, AAV-mediated polynucleotide delivery for diseased that affect cells, tissues, and organs other than the liver, such as the central nervous system) typically requires an injection of a large dose of virus (typically about 2×10¹⁴ vg/kg), which often results in liver toxicity. Furthermore, because large doses are required when using conventional rAAVs, manufacturing sufficient amounts of a therapeutic rAAV needed to dose adult patients is extremely challenging. Additionally, due to differences in gene expression and physiology, mouse and primate models respond differently to viral capsids. Transduction efficiency of different virus particles varies between different species, and as a result, preclinical studies in mice often do not accurately reflect results in primates, including humans. As such there exists a need for improved rAAVs for use in the treatment of various genetic diseases.

### SUMMARY

[0005] The present invention provides novel capsid protein variants for viral vectors that detarget liver tissue and target skeletal muscle and heart tissue at the same time. Aspects of the present invention provide adeno-associated virus (AAV) vector's comprising a capsid protein comprising the amino acid sequence RGDR. In the capsid protein, RGDR may be inserted after amino acid 455 in reference to an AAV9 capsid or equivalent position in another AAV capsid. AAV vectors may comprise the amino acid sequence X₁NX₂X₃X₄RGDRX₅X₆L, wherein X₁, X₂, X₃, X₄, X₅, and X₆ may be any amino acid.

[0006] In aspects of the invention, X₁ may be an amino acid selected from the group consisting of: A, I, F, G, H, L, M, Q, S, T, V. In preferred aspects of the invention, X₁ may be an amino acid selected from the group consisting of: A, I, L, M, S, V.

[0007] In aspects of the invention, X₂ may be an amino acid selected from the group consisting of A, G, S, T, Y.

[0008] In aspects of the invention, X₃ may be an amino acid selected from the group consisting of S, N, G, P. In preferred aspects of the invention, X₃ may be S.

[0009] In aspects of the invention, X₄ may be an amino acid selected from the group consisting of A, G, H, I, M, S, T, V.

[0010] In aspects of the invention, X₅ may be an amino acid selected from the group consisting of A, G, Q.

[0011] In aspects of the invention, X₆ may be an amino acid selected from the group consisting of A, I, L, M, N, Y. In preferred aspects of the invention, X₆ may be selected from the group consisting of A, S, and Y.

[0012] X₁ may is located at amino acid 451, X₂ located at amino acid 453, X₃ located at amino acid 454, X₄ is located amino acid 455, and RGDRX₅X₆L inserted after amino acid 455 in reference to an AAV9 capsid or equivalent position in another AAV capsid.

[0013] In aspects of the invention, two amino acids from X₁, X₂, X₃, and X₄ are wild type amino acids in reference to an AAV9 capsid or equivalent position in another AAV capsid and two amino acids from X₁, X₂, X₃, and X₄ are not wild type amino acids.

[0014] For example, capsid proteins variants of the invention may comprise a sequence as set forth in Table 1a. Notably, capsid protein variants on the invention comprise deletions, substitutions, and/or insertions relative to wild-type viral vector capsids.

[0015] In aspects of the invention, the capsid protein comprises an amino acid sequence selected from Table 1a and the amino acid sequence is in hypervariable region IV (HVR IV) relative to wild-type AAV9. The capsid protein variant may comprise substitutions at amino acids 451-455 relative to a wild-type AAV9 vector capsid. For example, the substitutions at amino acids 451-455 relative to a wild-type AAV9 vector capsid may be an amino acid sequence selected from column 1 of Table 1b. In aspects of the invention, the capsid protein variant may further comprise an insert. For example, the capsid protein may comprise a 7-mer insert selected from column 2 of Table 1b. The insert may be in the location after amino acid 455 relative to a wild-type AAV9 vector.

[0016] Advantageously, viral vectors comprising an amino acid sequence of the invention exhibit muscle tropism as compared to a wild-type AAV vector.

[0017] In aspects of the invention, the capsid protein further comprises a deletion of G267 in reference to an AAV9 capsid or equivalent position in another AAV capsid. Advantageously, the vector may exhibit reduced liver tropism as compared to a wild-type AAV vector.

[0018] As described, for the HVR IV variants, the 5 amino acids upstream are at positions 451-455, shown in column 1 of Table 1b. The 7-mer insert for HVR IV variants starts with “RGD” and is inserted after amino acid 455, shown in column 2 of Table 1b.

TABLE 1a
HVR IV Capsid Variants

| Amino Acid | |
|---|---|
| Sequence | SEQ ID NO: |
| ANASARGDRAAL | 2 |
| ANASARGDRGSL | 3 |
| ANASARGDRGYL | 4 |
| ANASARGDRQAL | 5 |
| ANASARGDRQSL | 6 |
| ANASARGDRQYL | 7 |
| ANASGRGDRAAL | 8 |
| ANASGRGDRASL | 9 |
| ANASGRGDRAYL | 10 |
| ANASGRGDRGAL | 11 |
| ANASGRGDRGSL | 12 |
| ANASGRGDRGYL | 13 |
| ANASGRGDRQAL | 14 |
| ANASGRGDRQSL | 15 |
| ANASGRGDRQYL | 16 |
| ANASMRGDRAAL | 17 |
| ANASMRGDRASL | 18 |
| ANASMRGDRAYL | 19 |
| ANASMRGDRQAL | 20 |
| ANASMRGDRQSL | 21 |
| ANASSRGDRGSL | 22 |
| ANASSRGDRGYL | 23 |
| ANASSRGDRQAL | 24 |
| ANASSRGDRQSL | 25 |
| ANASSRGDRQYL | 26 |
| ANASTRGDRASL | 27 |
| ANASTRGDRAYL | 28 |
| ANASTRGDRGAL | 29 |
| ANASTRGDRGSL | 30 |
| ANASTRGDRGYL | 31 |
| ANASTRGDRQAL | 32 |
| ANASTRGDRQSL | 33 |
| ANASTRGDRQYL | 34 |
| ANASVRGDRASL | 35 |
| ANASVRGDRGYL | 36 |
| ANASVRGDRQAL | 37 |
| ANASVRGDRQSL | 38 |
| ANASVRGDRQYL | 39 |
| ANGNFRGDRQNL | 40 |
| ANGNVRGDRGML | 41 |
| ANGSARGDRAYL | 42 |
| ANGSARGDRGSL | 43 |
| ANGSARGDRGYL | 44 |
| ANGSARGDRQAL | 45 |
| ANGSARGDRQYL | 46 |
| ANGSGRGDRAAL | 47 |
| ANGSGRGDRAYL | 48 |
| ANGSGRGDRGAL | 49 |
| ANGSGRGDRGSL | 50 |
| ANGSGRGDRGYL | 51 |
| ANGSGRGDRQAL | 52 |
| ANGSGRGDRQSL | 53 |
| ANGSGRGDRQYL | 54 |
| ANGSMRGDRGYL | 55 |
| ANGSMRGDRQAL | 56 |
| ANGSMRGDRQSL | 57 |
| ANGSMRGDRQYL | 58 |
| ANGSSRGDRAYL | 59 |
| ANGSSRGDRGSL | 60 |
| ANGSSRGDRGYL | 61 |
| ANGSSRGDRQAL | 62 |
| ANGSSRGDRQSL | 63 |
| ANGSSRGDRQYL | 64 |
| ANGSTRGDRAAL | 65 |
| ANGSTRGDRAYL | 66 |
| ANGSTRGDRGAL | 67 |
| ANGSTRGDRGYL | 68 |
| ANGSTRGDRQAL | 69 |
| ANGSTRGDRQSL | 70 |
| ANGSTRGDRQYL | 71 |
| ANGSVRGDRAYL | 72 |
| ANGSVRGDRGYL | 73 |
| ANGSVRGDRQAL | 74 |
| ANGSVRGDRQYL | 75 |
| ANSGMRGDRGAL | 76 |
| ANSSARGDRGAL | 77 |
| ANSSARGDRGSL | 78 |
| ANSSARGDRGYL | 79 |
| ANSSARGDRQAL | 80 |
| ANSSARGDRQSL | 81 |
| ANSSARGDRQYL | 82 |
| ANSSGRGDRAAL | 83 |
| ANSSGRGDRASL | 84 |
| ANSSGRGDRAYL | 85 |
| ANSSGRGDRGAL | 86 |
| ANSSGRGDRGSL | 87 |
| ANSSGRGDRGYL | 88 |
| ANSSGRGDRQAL | 89 |
| ANSSGRGDRQSL | 90 |
| ANSSGRGDRQYL | 91 |
| ANSSMRGDRAYL | 92 |
| ANSSMRGDRQAL | 93 |
| ANSSMRGDRQSL | 94 |
| ANSSMRGDRQYL | 95 |
| ANSSSRGDRGSL | 96 |
| ANSSSRGDRGYL | 97 |
| ANSSSRGDRQAL | 98 |
| ANSSSRGDRQSL | 99 |
| ANSSSRGDRQYL | 100 |
| ANSSTRGDRAAL | 101 |
| ANSSTRGDRGSL | 102 |
| ANSSTRGDRQAL | 103 |
| ANSSTRGDRQSL | 104 |
| ANSSTRGDRQYL | 105 |
| ANSSVRGDRAYL | 106 |
| ANSSVRGDRGYL | 107 |
| ANSSVRGDRQAL | 108 |
| ANSSVRGDRQSL | 109 |
| ANSSVRGDRQYL | 110 |
| ANTSARGDRAYL | 111 |
| ANTSARGDRGAL | 112 |
| ANTSARGDRGSL | 113 |
| ANTSARGDRGYL | 114 |
| ANTSARGDRQAL | 115 |
| ANTSARGDRQYL | 116 |
| ANTSGRGDRASL | 117 |
| ANTSGRGDRGAL | 118 |
| ANTSGRGDRGSL | 119 |
| ANTSGRGDRGYL | 120 |
| ANTSGRGDRQAL | 121 |
| ANTSGRGDRQSL | 122 |
| ANTSGRGDRQYL | 123 |
| ANTSMRGDRAYL | 124 |
| ANTSMRGDRQAL | 125 |
| ANTSMRGDRQSL | 126 |
| ANTSMRGDRQYL | 127 |
| ANTSSRGDRGSL | 128 |
| ANTSSRGDRQAL | 129 |
| ANTSSRGDRQYL | 130 |
| ANTSTRGDRAAL | 131 |
| ANTSTRGDRQAL | 132 |
| ANTSTRGDRQSL | 133 |
| ANTSTRGDRQYL | 134 |
| ANTSVRGDRAYL | 135 |
| ANTSVRGDRGSL | 136 |
| ANTSVRGDRQAL | 137 |
| ANTSVRGDRQSL | 138 |
| ANTSVRGDRQYL | 139 |
| ANYPHRGDRGAL | 140 |
| ANYSARGDRAAL | 141 |
| ANYSARGDRASL | 142 |
| ANYSARGDRGAL | 143 |
| ANYSARGDRGSL | 144 |
| ANYSARGDRQAL | 145 |
| ANYSARGDRQSL | 146 |
| ANYSGRGDRAAL | 147 |
| ANYSGRGDRASL | 148 |
| ANYSGRGDRGAL | 149 |
| ANYSGRGDRGSL | 150 |
| ANYSGRGDRQAL | 151 |
| ANYSGRGDRQSL | 152 |
| ANYSGRGDRQYL | 153 |
| ANYSMRGDRAAL | 154 |
| ANYSMRGDRASL | 155 |
| ANYSMRGDRAYL | 156 |
| ANYSMRGDRQAL | 157 |
| ANYSMRGDRQSL | 158 |
| ANYSSRGDRGAL | 159 |
| ANYSSRGDRGSL | 160 |
| ANYSSRGDRQAL | 161 |
| ANYSSRGDRQSL | 162 |
| ANYSSRGDRQYL | 163 |
| ANYSTRGDRQAL | 164 |
| ANYSTRGDRQSL | 165 |
| ANYSTRGDRQYL | 166 |
| ANYSVRGDRQAL | 167 |
| ANYSVRGDRQSL | 168 |
| ANYSVRGDRQYL | 169 |
| FNSGMRGDRGAL | 170 |
| GNSGMRGDRGAL | 171 |
| HNSGMRGDRGAL | 172 |
| LNASARGDRAAL | 173 |
| LNASARGDRASL | 174 |
| LNASARGDRAYL | 175 |
| LNASARGDRGAL | 176 |
| LNASARGDRGSL | 177 |
| LNASARGDRGYL | 178 |
| LNASARGDRQAL | 179 |
| LNASARGDRQSL | 180 |
| LNASARGDRQYL | 181 |
| LNASGRGDRAAL | 182 |
| LNASGRGDRASL | 183 |
| LNASGRGDRAYL | 184 |
| LNASGRGDRGAL | 185 |
| LNASGRGDRGSL | 186 |
| LNASGRGDRGYL | 187 |
| LNASGRGDRQAL | 188 |
| LNASGRGDRQSL | 189 |
| LNASGRGDRQYL | 190 |
| LNASIRGDRQLL | 191 |
| LNASMRGDRAAL | 192 |
| LNASMRGDRASL | 193 |
| LNASMRGDRAYL | 194 |
| LNASMRGDRGAL | 195 |
| LNASMRGDRGSL | 196 |
| LNASMRGDRGYL | 197 |
| LNASMRGDRQAL | 198 |
| LNASMRGDRQSL | 199 |
| LNASMRGDRQYL | 200 |
| LNASSRGDRAAL | 201 |
| LNASSRGDRASL | 202 |
| LNASSRGDRGAL | 203 |
| LNASSRGDRGSL | 204 |
| LNASSRGDRQAL | 205 |
| LNASSRGDRQSL | 206 |
| LNASSRGDRQYL | 207 |
| LNASTRGDRAAL | 208 |
| LNASTRGDRASL | 209 |
| LNASTRGDRGAL | 210 |
| LNASTRGDRGSL | 211 |
| LNASTRGDRGYL | 212 |
| LNASTRGDRQAL | 213 |
| LNASTRGDRQSL | 214 |
| LNASTRGDRQYL | 215 |
| LNASVRGDRAAL | 216 |
| LNASVRGDRASL | 217 |
| LNASVRGDRGAL | 218 |
| LNASVRGDRGSL | 219 |
| LNASVRGDRQAL | 220 |
| LNASVRGDRQSL | 221 |
| LNASVRGDRQYL | 222 |
| LNGNFRGDRQNL | 223 |
| LNGNVRGDRGML | 224 |
| LNGSARGDRAAL | 225 |
| LNGSARGDRAYL | 226 |
| LNGSARGDRGSL | 227 |
| LNGSARGDRGYL | 228 |
| LNGSARGDRQAL | 229 |
| LNGSARGDRQSL | 230 |
| LNGSARGDRQYL | 231 |
| LNGSGRGDRAAL | 232 |
| LNGSGRGDRAYL | 233 |
| LNGSGRGDRGAL | 234 |
| LNGSGRGDRGSL | 235 |
| LNGSGRGDRGYL | 236 |
| LNGSGRGDRQAL | 237 |
| LNGSGRGDRQYL | 238 |
| LNGSMRGDRASL | 239 |
| LNGSMRGDRGYL | 240 |
| LNGSMRGDRQAL | 241 |
| LNGSMRGDRQSL | 242 |
| LNGSMRGDRQYL | 243 |
| LNGSSRGDRAAL | 244 |
| LNGSSRGDRAYL | 245 |
| LNGSSRGDRGAL | 246 |
| LNGSSRGDRQYL | 247 |
| LNGSTRGDRAAL | 248 |
| LNGSTRGDRASL | 249 |
| LNGSTRGDRAYL | 250 |
| LNGSTRGDRGAL | 251 |
| LNGSTRGDRGSL | 252 |
| LNGSTRGDRGYL | 253 |
| LNGSTRGDRQAL | 254 |
| LNGSTRGDRQSL | 255 |
| LNGSTRGDRQYL | 256 |
| LNGSVRGDRASL | 257 |
| LNGSVRGDRAYL | 258 |
| LNGSVRGDRGYL | 259 |
| LNGSVRGDRQAL | 260 |
| LNGSVRGDRQSL | 261 |
| LNGSVRGDRQYL | 262 |
| LNSGMRGDRGAL | 263 |
| LNSSARGDRASL | 264 |
| LNSSARGDRAYL | 265 |
| LNSSARGDRGAL | 266 |
| LNSSARGDRGIL | 267 |
| LNSSARGDRGSL | 268 |
| LNSSARGDRGYL | 269 |
| LNSSARGDRQAL | 270 |
| LNSSARGDRQSL | 271 |
| LNSSARGDRQYL | 272 |
| LNSSGRGDRAAL | 273 |
| LNSSGRGDRASL | 274 |
| LNSSGRGDRAYL | 275 |
| LNSSGRGDRGAL | 276 |
| LNSSGRGDRGSL | 277 |
| LNSSGRGDRGYL | 278 |
| LNSSGRGDRQAL | 279 |
| LNSSGRGDRQSL | 280 |
| LNSSGRGDRQYL | 281 |
| LNSSMRGDRAAL | 282 |
| LNSSMRGDRASL | 283 |
| LNSSMRGDRAYL | 284 |
| LNSSMRGDRGAL | 285 |
| LNSSMRGDRGSL | 286 |
| LNSSMRGDRQAL | 287 |
| LNSSMRGDRQSL | 288 |
| LNSSMRGDRQYL | 289 |
| LNSSSRGDRAAL | 290 |
| LNSSSRGDRGAL | 291 |
| LNSSSRGDRGSL | 292 |
| LNSSSRGDRQAL | 293 |
| LNSSSRGDRQSL | 294 |
| LNSSSRGDRQYL | 295 |
| LNSSTRGDRAAL | 296 |
| LNSSTRGDRASL | 297 |
| LNSSTRGDRGAL | 298 |
| LNSSTRGDRGSL | 299 |
| LNSSTRGDRQAL | 300 |
| LNSSTRGDRQSL | 301 |
| LNSSTRGDRQYL | 302 |
| LNSSVRGDRAAL | 303 |
| LNSSVRGDRASL | 304 |
| LNSSVRGDRGAL | 305 |
| LNSSVRGDRGSL | 306 |
| LNSSVRGDRGYL | 307 |
| LNSSVRGDRQAL | 308 |
| LNSSVRGDRQSL | 309 |
| LNSSVRGDRQYL | 310 |
| LNTSARGDRAAL | 311 |
| LNTSARGDRASL | 312 |
| LNTSARGDRAYL | 313 |
| LNTSARGDRGAL | 314 |
| LNTSARGDRGSL | 315 |
| LNTSARGDRGYL | 316 |
| LNTSARGDRQAL | 317 |
| LNTSARGDRQSL | 318 |
| LNTSARGDRQYL | 319 |
| LNTSGRGDRAAL | 320 |
| LNTSGRGDRASL | 321 |
| LNTSGRGDRAYL | 322 |
| LNTSGRGDRGAL | 323 |
| LNTSGRGDRGSL | 324 |
| LNTSGRGDRGYL | 325 |
| LNTSGRGDRQAL | 326 |
| LNTSGRGDRQSL | 327 |
| LNTSGRGDRQYL | 328 |
| LNTSMRGDRAAL | 329 |
| LNTSMRGDRASL | 330 |
| LNTSMRGDRAYL | 331 |
| LNTSMRGDRGAL | 332 |
| LNTSMRGDRGSL | 333 |
| LNTSMRGDRQAL | 334 |
| LNTSMRGDRQSL | 335 |
| LNTSMRGDRQYL | 336 |
| LNTSSRGDRAAL | 337 |
| LNTSSRGDRGSL | 338 |
| LNTSSRGDRQAL | 339 |
| LNTSSRGDRQSL | 340 |
| LNTSSRGDRQYL | 341 |
| LNTSTRGDRAAL | 342 |
| LNTSTRGDRASL | 343 |
| LNTSTRGDRGAL | 344 |
| LNTSTRGDRGSL | 345 |
| LNTSTRGDRQAL | 346 |
| LNTSTRGDRQSL | 347 |
| LNTSTRGDRQYL | 348 |
| LNTSVRGDRAAL | 349 |
| LNTSVRGDRASL | 350 |
| LNTSVRGDRAYL | 351 |
| LNTSVRGDRGAL | 352 |
| LNTSVRGDRGSL | 353 |
| LNTSVRGDRQAL | 354 |
| LNTSVRGDRQSL | 355 |
| LNYPHRGDRGAL | 356 |
| LNYSARGDRGAL | 357 |
| LNYSARGDRGSL | 358 |
| LNYSARGDRQAL | 359 |
| LNYSARGDRQSL | 360 |
| LNYSARGDRQYL | 361 |
| LNYSGRGDRAAL | 362 |
| LNYSGRGDRASL | 363 |
| LNYSGRGDRGAL | 364 |
| LNYSGRGDRGSL | 365 |
| LNYSGRGDRQAL | 366 |
| LNYSGRGDRQSL | 367 |
| LNYSGRGDRQYL | 368 |
| LNYSMRGDRQAL | 369 |
| LNYSMRGDRQSL | 370 |
| LNYSSRGDRGAL | 371 |
| LNYSSRGDRGSL | 372 |
| LNYSSRGDRQAL | 373 |
| LNYSSRGDRQSL | 374 |
| LNYSSRGDRQYL | 375 |
| LNYSTRGDRASL | 376 |
| LNYSTRGDRGAL | 377 |
| LNYSTRGDRGSL | 378 |
| LNYSTRGDRQAL | 379 |
| LNYSTRGDRQSL | 380 |
| LNYSTRGDRQYL | 381 |
| LNYSVRGDRQAL | 382 |
| LNYSVRGDRQSL | 383 |
| MNASARGDRAAL | 384 |
| MNASARGDRAYL | 385 |
| MNASARGDRGSL | 386 |
| MNASARGDRGYL | 387 |
| MNASARGDRQAL | 388 |
| MNASARGDRQSL | 389 |
| MNASARGDRQYL | 390 |
| MNASGRGDRAAL | 391 |
| MNASGRGDRASL | 392 |
| MNASGRGDRAYL | 393 |
| MNASGRGDRGSL | 394 |
| MNASGRGDRQAL | 395 |
| MNASGRGDRQSL | 396 |
| MNASGRGDRQYL | 397 |
| MNASIRGDRQLL | 398 |
| MNASMRGDRAAL | 399 |
| MNASMRGDRAYL | 400 |
| MNASMRGDRGAL | 401 |
| MNASMRGDRQAL | 402 |
| MNASMRGDRQSL | 403 |
| MNASSRGDRAAL | 404 |
| MNASTRGDRAAL | 405 |
| MNASTRGDRASL | 406 |
| MNASTRGDRAYL | 407 |
| MNASTRGDRGAL | 408 |
| MNASTRGDRGSL | 409 |
| MNASTRGDRQAL | 410 |
| MNASTRGDRQSL | 411 |
| MNASTRGDRQYL | 412 |
| MNASVRGDRAAL | 413 |
| MNASVRGDRASL | 414 |
| MNASVRGDRAYL | 415 |
| MNASVRGDRQAL | 416 |
| MNASVRGDRQSL | 417 |
| MNASVRGDRQYL | 418 |
| MNGNFRGDRQNL | 419 |
| MNGSARGDRAYL | 420 |
| MNGSARGDRGYL | 421 |
| MNGSARGDRQAL | 422 |
| MNGSARGDRQSL | 423 |
| MNGSARGDRQYL | 424 |
| MNGSGRGDRAAL | 425 |
| MNGSGRGDRAYL | 426 |
| MNGSGRGDRGAL | 427 |
| MNGSGRGDRGSL | 428 |
| MNGSGRGDRGYL | 429 |
| MNGSGRGDRQAL | 430 |
| MNGSGRGDRQSL | 431 |
| MNGSGRGDRQYL | 432 |
| MNGSMRGDRQAL | 433 |
| MNGSMRGDRQSL | 434 |
| MNGSMRGDRQYL | 435 |
| MNGSSRGDRQYL | 436 |
| MNGSTRGDRAYL | 437 |
| MNGSTRGDRGAL | 438 |
| MNGSTRGDRGYL | 439 |
| MNGSTRGDRQAL | 440 |
| MNGSTRGDRQSL | 441 |
| MNGSTRGDRQYL | 442 |
| MNGSVRGDRGYL | 443 |
| MNGSVRGDRQAL | 444 |
| MNGSVRGDRQYL | 445 |
| MNSGMRGDRGAL | 446 |
| MNSSARGDRAAL | 447 |
| MNSSARGDRAYL | 448 |
| MNSSARGDRGSL | 449 |
| MNSSARGDRGYL | 450 |
| MNSSARGDRQAL | 451 |
| MNSSARGDRQSL | 452 |
| MNSSARGDRQYL | 453 |
| MNSSGRGDRAAL | 454 |
| MNSSGRGDRASL | 455 |
| MNSSGRGDRAYL | 456 |
| MNSSGRGDRGAL | 457 |
| MNSSGRGDRGSL | 458 |
| MNSSGRGDRQAL | 459 |
| MNSSGRGDRQSL | 460 |
| MNSSGRGDRQYL | 461 |
| MNSSMRGDRAAL | 462 |
| MNSSMRGDRASL | 463 |
| MNSSMRGDRAYL | 464 |
| MNSSMRGDRGSL | 465 |
| MNSSMRGDRQAL | 466 |
| MNSSMRGDRQSL | 467 |
| MNSSMRGDRQYL | 468 |
| MNSSSRGDRAAL | 469 |
| MNSSTRGDRAAL | 470 |
| MNSSTRGDRASL | 471 |
| MNSSTRGDRQAL | 472 |
| MNSSTRGDRQSL | 473 |
| MNSSTRGDRQYL | 474 |
| MNSSVRGDRAAL | 475 |
| MNSSVRGDRAYL | 476 |
| MNSSVRGDRQAL | 477 |
| MNSSVRGDRQSL | 478 |
| MNSSVRGDRQYL | 479 |
| MNTSARGDRAYL | 480 |
| MNTSGRGDRAAL | 481 |
| MNTSGRGDRQAL | 482 |
| MNTSGRGDRQYL | 483 |
| MNTSMRGDRAYL | 484 |
| MNTSTRGDRQYL | 485 |
| MNYPHRGDRGAL | 486 |
| MNYSARGDRAAL | 487 |
| MNYSARGDRGYL | 488 |
| MNYSARGDRQAL | 489 |
| MNYSARGDRQSL | 490 |
| MNYSGRGDRAAL | 491 |
| MNYSGRGDRASL | 492 |
| MNYSGRGDRGSL | 493 |
| MNYSGRGDRQAL | 494 |
| MNYSGRGDRQSL | 495 |
| MNYSSRGDRQAL | 496 |
| MNYSTRGDRAAL | 497 |
| MNYSTRGDRQAL | 498 |
| MNYSTRGDRQSL | 499 |
| MNYSTRGDRQYL | 500 |
| NNSGMRGDRGAL | 501 |
| QNSGMRGDRGAL | 502 |
| SNASARGDRAAL | 503 |
| SNASARGDRASL | 504 |
| SNASARGDRAYL | 505 |
| SNASARGDRGAL | 506 |
| SNASARGDRGSL | 507 |
| SNASARGDRGYL | 508 |
| SNASARGDRQAL | 509 |
| SNASARGDRQSL | 510 |
| SNASARGDRQYL | 511 |
| SNASGRGDRAAL | 512 |
| SNASGRGDRASL | 513 |
| SNASGRGDRAYL | 514 |
| SNASGRGDRGAL | 515 |
| SNASGRGDRGSL | 516 |
| SNASGRGDRGYL | 517 |
| SNASGRGDRQAL | 518 |
| SNASGRGDRQSL | 519 |
| SNASGRGDRQYL | 520 |
| SNASIRGDRQLL | 521 |
| SNASMRGDRAAL | 522 |
| SNASMRGDRASL | 523 |
| SNASMRGDRGAL | 524 |
| SNASMRGDRGSL | 525 |
| SNASMRGDRQAL | 526 |
| SNASMRGDRQSL | 527 |
| SNASSRGDRAAL | 528 |
| SNASSRGDRASL | 529 |
| SNASSRGDRAYL | 530 |
| SNASSRGDRGAL | 531 |
| SNASSRGDRGSL | 532 |
| SNASSRGDRQAL | 533 |
| SNASSRGDRQSL | 534 |
| SNASSRGDRQYL | 535 |
| SNASTRGDRAAL | 536 |
| SNASTRGDRASL | 537 |
| SNASTRGDRAYL | 538 |
| SNASTRGDRGAL | 539 |
| SNASTRGDRGSL | 540 |
| SNASTRGDRGYL | 541 |
| SNASTRGDRQAL | 542 |
| SNASTRGDRQSL | 543 |
| SNASTRGDRQYL | 544 |
| SNASVRGDRAAL | 545 |
| SNASVRGDRASL | 546 |
| SNASVRGDRAYL | 547 |
| SNASVRGDRGSL | 548 |
| SNASVRGDRGYL | 549 |
| SNASVRGDRQAL | 550 |
| SNASVRGDRQSL | 551 |
| SNASVRGDRQYL | 552 |
| SNGNFRGDRQNL | 553 |
| SNGNVRGDRGML | 554 |
| SNGSARGDRGYL | 555 |
| SNGSARGDRQAL | 556 |
| SNGSARGDRQSL | 557 |
| SNGSARGDRQYL | 558 |
| SNGSGRGDRASL | 559 |
| SNGSGRGDRAYL | 560 |
| SNGSGRGDRGAL | 561 |
| SNGSGRGDRGSL | 562 |
| SNGSGRGDRGYL | 563 |
| SNGSGRGDRQAL | 564 |
| SNGSGRGDRQSL | 565 |
| SNGSGRGDRQYL | 566 |
| SNGSMRGDRAYL | 567 |
| SNGSMRGDRGYL | 568 |
| SNGSMRGDRQAL | 569 |
| SNGSMRGDRQSL | 570 |
| SNGSMRGDRQYL | 571 |
| SNGSSRGDRGYL | 572 |
| SNGSSRGDRQYL | 573 |
| SNGSTRGDRAAL | 574 |
| SNGSTRGDRASL | 575 |
| SNGSTRGDRGAL | 576 |
| SNGSTRGDRGYL | 577 |
| SNGSTRGDRQAL | 578 |
| SNGSTRGDRQSL | 579 |
| SNGSTRGDRQYL | 580 |
| SNGSVRGDRGYL | 581 |
| SNGSVRGDRQAL | 582 |
| SNGSVRGDRQSL | 583 |
| SNGSVRGDRQYL | 584 |
| SNSGMRGDRGAL | 585 |
| SNSSARGDRAYL | 586 |
| SNSSARGDRGAL | 587 |
| SNSSARGDRGIL | 588 |
| SNSSARGDRGSL | 589 |
| SNSSARGDRGYL | 590 |
| SNSSARGDRQAL | 591 |
| SNSSARGDRQSL | 592 |
| SNSSARGDRQYL | 593 |
| SNSSGRGDRAAL | 594 |
| SNSSGRGDRAYL | 595 |
| SNSSGRGDRGAL | 596 |
| SNSSGRGDRGSL | 597 |
| SNSSGRGDRGYL | 598 |
| SNSSGRGDRQAL | 599 |
| SNSSGRGDRQSL | 600 |
| SNSSGRGDRQYL | 601 |
| SNSSMRGDRAAL | 602 |
| SNSSMRGDRASL | 603 |
| SNSSMRGDRAYL | 604 |
| SNSSMRGDRGSL | 605 |
| SNSSMRGDRQAL | 606 |
| SNSSMRGDRQSL | 607 |
| SNSSMRGDRQYL | 608 |
| SNSSSRGDRAAL | 609 |
| SNSSSRGDRGSL | 610 |
| SNSSSRGDRQAL | 611 |
| SNSSSRGDRQSL | 612 |
| SNSSSRGDRQYL | 613 |
| SNSSTRGDRAAL | 614 |
| SNSSTRGDRASL | 615 |
| SNSSTRGDRGSL | 616 |
| SNSSTRGDRGYL | 617 |
| SNSSTRGDRQAL | 618 |
| SNSSTRGDRQSL | 619 |
| SNSSTRGDRQYL | 620 |
| SNSSVRGDRQAL | 621 |
| SNSSVRGDRQSL | 622 |
| SNSSVRGDRQYL | 623 |
| SNTSARGDRAAL | 624 |
| SNTSARGDRGAL | 625 |
| SNTSARGDRGSL | 626 |
| SNTSARGDRGYL | 627 |
| SNTSARGDRQAL | 628 |
| SNTSARGDRQSL | 629 |
| SNTSARGDRQYL | 630 |
| SNTSGRGDRAAL | 631 |
| SNTSGRGDRASL | 632 |
| SNTSGRGDRGAL | 633 |
| SNTSGRGDRGSL | 634 |
| SNTSGRGDRGYL | 635 |
| SNTSGRGDRQAL | 636 |
| SNTSGRGDRQSL | 637 |
| SNTSGRGDRQYL | 638 |
| SNTSMRGDRAYL | 639 |
| SNTSMRGDRGSL | 640 |
| SNTSMRGDRQAL | 641 |
| SNTSMRGDRQSL | 642 |
| SNTSSRGDRQAL | 643 |
| SNTSTRGDRQAL | 644 |
| SNTSTRGDRQSL | 645 |
| SNTSTRGDRQYL | 646 |
| SNTSVRGDRAYL | 647 |
| SNTSVRGDRQAL | 648 |
| SNTSVRGDRQSL | 649 |
| SNTSVRGDRQYL | 650 |
| SNYPHRGDRGAL | 651 |
| SNYSARGDRAAL | 652 |
| SNYSARGDRASL | 653 |
| SNYSARGDRGAL | 654 |
| SNYSARGDRGSL | 655 |
| SNYSARGDRQAL | 656 |
| SNYSARGDRQSL | 657 |
| SNYSARGDRQYL | 658 |
| SNYSGRGDRAAL | 659 |
| SNYSGRGDRGAL | 660 |
| SNYSGRGDRGSL | 661 |
| SNYSGRGDRQAL | 662 |
| SNYSGRGDRQSL | 663 |
| SNYSMRGDRAAL | 664 |
| SNYSMRGDRASL | 665 |
| SNYSMRGDRGSL | 666 |
| SNYSMRGDRQAL | 667 |
| SNYSMRGDRQSL | 668 |
| SNYSSRGDRGAL | 669 |
| SNYSSRGDRGSL | 670 |
| SNYSSRGDRQAL | 671 |
| SNYSSRGDRQSL | 672 |
| SNYSTRGDRAAL | 673 |
| SNYSTRGDRGAL | 674 |
| SNYSTRGDRGSL | 675 |
| SNYSTRGDRQAL | 676 |
| SNYSTRGDRQSL | 677 |
| SNYSTRGDRQYL | 678 |
| SNYSVRGDRQAL | 679 |
| SNYSVRGDRQSL | 680 |
| SNYSVRGDRQYL | 681 |
| TNSGMRGDRGAL | 682 |
| VNASARGDRAAL | 683 |
| VNASARGDRGAL | 684 |
| VNASARGDRGSL | 685 |
| VNASARGDRGYL | 686 |
| VNASARGDRQAL | 687 |
| VNASARGDRQYL | 688 |
| VNASGRGDRAAL | 689 |
| VNASGRGDRAYL | 690 |
| VNASGRGDRGAL | 691 |
| VNASGRGDRGSL | 692 |
| VNASGRGDRGYL | 693 |
| VNASGRGDRQAL | 694 |
| VNASGRGDRQYL | 695 |
| VNASMRGDRAYL | 696 |
| VNASMRGDRQAL | 697 |
| VNASMRGDRQSL | 698 |
| VNASSRGDRGSL | 699 |
| VNASSRGDRQAL | 700 |
| VNASSRGDRQYL | 701 |
| VNASTRGDRAAL | 702 |
| VNASTRGDRGAL | 703 |
| VNASTRGDRGSL | 704 |
| VNASTRGDRGYL | 705 |
| VNASTRGDRQAL | 706 |
| VNASTRGDRQSL | 707 |
| VNASTRGDRQYL | 708 |
| VNASVRGDRGSL | 709 |
| VNASVRGDRGYL | 710 |
| VNASVRGDRQAL | 711 |
| VNASVRGDRQSL | 712 |
| VNASVRGDRQYL | 713 |
| VNGNFRGDRQNL | 714 |
| VNGNVRGDRGML | 715 |
| VNGSARGDRAYL | 716 |
| VNGSARGDRGAL | 717 |
| VNGSARGDRGSL | 718 |
| VNGSARGDRGYL | 719 |
| VNGSARGDRQAL | 720 |
| VNGSARGDRQSL | 721 |
| VNGSARGDRQYL | 722 |
| VNGSGRGDRAAL | 723 |
| VNGSGRGDRASL | 724 |
| VNGSGRGDRAYL | 725 |
| VNGSGRGDRGAL | 726 |
| VNGSGRGDRGSL | 727 |
| VNGSGRGDRGYL | 728 |
| VNGSGRGDRQAL | 729 |
| VNGSGRGDRQSL | 730 |
| VNGSGRGDRQYL | 731 |
| VNGSMRGDRGYL | 732 |
| VNGSMRGDRQAL | 733 |
| VNGSMRGDRQSL | 734 |
| VNGSMRGDRQYL | 735 |
| VNGSSRGDRAYL | 736 |
| VNGSSRGDRGAL | 737 |
| VNGSSRGDRGSL | 738 |
| VNGSSRGDRQAL | 739 |
| VNGSSRGDRQSL | 740 |
| VNGSSRGDRQYL | 741 |
| VNGSTRGDRAAL | 742 |
| VNGSTRGDRAYL | 743 |
| VNGSTRGDRGAL | 744 |
| VNGSTRGDRGYL | 745 |
| VNGSTRGDRQAL | 746 |
| VNGSTRGDRQSL | 747 |
| VNGSTRGDRQYL | 748 |
| VNGSVRGDRAYL | 749 |
| VNGSVRGDRQAL | 750 |
| VNGSVRGDRQSL | 751 |
| VNGSVRGDRQYL | 752 |
| VNSGMRGDRGAL | 753 |
| VNSSARGDRGAL | 754 |
| VNSSARGDRGSL | 755 |
| VNSSARGDRGYL | 756 |
| VNSSARGDRQAL | 757 |
| VNSSARGDRQSL | 758 |
| VNSSARGDRQYL | 759 |
| VNSSGRGDRAAL | 760 |
| VNSSGRGDRAYL | 761 |
| VNSSGRGDRGAL | 762 |
| VNSSGRGDRQAL | 763 |
| VNSSGRGDRQSL | 764 |
| VNSSGRGDRQYL | 765 |
| VNSSMRGDRAYL | 766 |
| VNSSMRGDRQAL | 767 |
| VNSSMRGDRQSL | 768 |
| VNSSMRGDRQYL | 769 |
| VNSSSRGDRGSL | 770 |
| VNSSSRGDRQAL | 771 |
| VNSSSRGDRQSL | 772 |
| VNSSTRGDRGAL | 773 |
| VNSSTRGDRQAL | 774 |
| VNSSTRGDRQSL | 775 |
| VNSSTRGDRQYL | 776 |
| VNSSVRGDRAYL | 777 |
| VNSSVRGDRQAL | 778 |
| VNSSVRGDRQSL | 779 |
| VNTSARGDRAYL | 780 |
| VNTSGRGDRAAL | 781 |
| VNTSGRGDRGAL | 782 |
| VNTSGRGDRGSL | 783 |
| VNTSGRGDRGYL | 784 |
| VNTSGRGDRQAL | 785 |
| VNTSGRGDRQSL | 786 |
| VNTSGRGDRQYL | 787 |
| VNTSTRGDRAYL | 788 |
| VNYPHRGDRGAL | 789 |
| VNYSARGDRGAL | 790 |
| VNYSARGDRGSL | 791 |
| VNYSARGDRQAL | 792 |
| VNYSARGDRQSL | 793 |
| VNYSGRGDRAAL | 794 |
| VNYSGRGDRGAL | 795 |
| VNYSGRGDRQAL | 796 |
| VNYSGRGDRQSL | 797 |
| VNYSGRGDRQYL | 798 |
| VNYSSRGDRGSL | 799 |
| VNYSSRGDRGYL | 800 |

TABLE 1b
Split Amino Acid Sequences from Table 1a

| 5 aa | SEQ | | SEQ |
|---|---|---|---|
| substi- | ID | 7 aa | ID |
| tution | NO | insert | NO |
| ANASA | 801 | RGDRAAL | 1600 |
| ANASA | 802 | RGDRGSL | 1601 |
| ANASA | 803 | RGDRGYL | 1602 |
| ANASA | 804 | RGDRQAL | 1603 |
| ANASA | 805 | RGDRQSL | 1604 |
| ANASA | 806 | RGDRQYL | 1605 |
| ANASG | 807 | RGDRAAL | 1606 |
| ANASG | 808 | RGDRASL | 1607 |
| ANASG | 809 | RGDRAYL | 1608 |
| ANASG | 810 | RGDRGAL | 1609 |
| ANASG | 811 | RGDRGSL | 1610 |
| ANASG | 812 | RGDRGYL | 1611 |
| ANASG | 813 | RGDRQAL | 1612 |
| ANASG | 814 | RGDRQSL | 1613 |
| ANASG | 815 | RGDRQYL | 1614 |
| ANASM | 816 | RGDRAAL | 1615 |
| ANASM | 817 | RGDRASL | 1616 |
| ANASM | 818 | RGDRAYL | 1617 |
| ANASM | 819 | RGDRQAL | 1618 |
| ANASM | 820 | RGDRQSL | 1619 |
| ANASS | 821 | RGDRGSL | 1620 |
| ANASS | 822 | RGDRGYL | 1621 |
| ANASS | 823 | RGDRQAL | 1622 |
| ANASS | 824 | RGDRQSL | 1623 |
| ANASS | 825 | RGDRQYL | 1624 |
| ANAST | 826 | RGDRASL | 1625 |
| ANAST | 827 | RGDRAYL | 1626 |
| ANAST | 828 | RGDRGAL | 1627 |
| ANAST | 829 | RGDRGSL | 1628 |
| ANAST | 830 | RGDRGYL | 1629 |
| ANAST | 831 | RGDRQAL | 1630 |
| ANAST | 832 | RGDRQSL | 1631 |
| ANAST | 833 | RGDRQYL | 1632 |
| ANASV | 834 | RGDRASL | 1633 |
| ANASV | 835 | RGDRGYL | 1634 |
| ANASV | 836 | RGDRQAL | 1635 |
| ANASV | 837 | RGDRQSL | 1636 |
| ANASV | 838 | RGDRQYL | 1637 |
| ANGNF | 839 | RGDRQNL | 1638 |
| ANGNV | 840 | RGDRGML | 1639 |
| ANGSA | 841 | RGDRAYL | 1640 |
| ANGSA | 842 | RGDRGSL | 1641 |
| ANGSA | 843 | RGDRGYL | 1642 |
| ANGSA | 844 | RGDRQAL | 1643 |
| ANGSA | 845 | RGDRQYL | 1644 |
| ANGSG | 846 | RGDRAAL | 1645 |
| ANGSG | 847 | RGDRAYL | 1646 |
| ANGSG | 848 | RGDRGAL | 1647 |
| ANGSG | 849 | RGDRGSL | 1648 |
| ANGSG | 850 | RGDRGYL | 1649 |
| ANGSG | 851 | RGDRQAL | 1650 |
| ANGSG | 852 | RGDRQSL | 1651 |
| ANGSG | 853 | RGDRQYL | 1652 |
| ANGSM | 854 | RGDRGYL | 1653 |
| ANGSM | 855 | RGDRQAL | 1654 |
| ANGSM | 856 | RGDRQSL | 1655 |
| ANGSM | 857 | RGDRQYL | 1656 |
| ANGSS | 858 | RGDRAYL | 1657 |
| ANGSS | 859 | RGDRGSL | 1658 |
| ANGSS | 860 | RGDRGYL | 1659 |
| ANGSS | 861 | RGDRQAL | 1660 |
| ANGSS | 862 | RGDRQSL | 1661 |
| ANGSS | 863 | RGDRQYL | 1662 |
| ANGST | 864 | RGDRAAL | 1663 |
| ANGST | 865 | RGDRAYL | 1664 |
| ANGST | 866 | RGDRGAL | 1665 |
| ANGST | 867 | RGDRGYL | 1666 |
| ANGST | 868 | RGDRQAL | 1667 |
| ANGST | 869 | RGDRQSL | 1668 |
| ANGST | 870 | RGDRQYL | 1669 |
| ANGSV | 871 | RGDRAYL | 1670 |
| ANGSV | 872 | RGDRGYL | 1671 |
| ANGSV | 873 | RGDRQAL | 1672 |
| ANGSV | 874 | RGDRQYL | 1673 |
| ANSGM | 875 | RGDRGAL | 1674 |
| ANSSA | 876 | RGDRGAL | 1675 |
| ANSSA | 877 | RGDRGSL | 1676 |
| ANSSA | 878 | RGDRGYL | 1677 |
| ANSSA | 879 | RGDRQAL | 1678 |
| ANSSA | 880 | RGDRQSL | 1679 |
| ANSSA | 881 | RGDRQYL | 1680 |
| ANSSG | 882 | RGDRAAL | 1681 |
| ANSSG | 883 | RGDRASL | 1682 |
| ANSSG | 884 | RGDRAYL | 1683 |
| ANSSG | 885 | RGDRGAL | 1684 |
| ANSSG | 886 | RGDRGSL | 1685 |
| ANSSG | 887 | RGDRGYL | 1686 |
| ANSSG | 888 | RGDRQAL | 1687 |
| ANSSG | 889 | RGDRQSL | 1688 |
| ANSSG | 890 | RGDRQYL | 1689 |
| ANSSM | 891 | RGDRAYL | 1690 |
| ANSSM | 892 | RGDRQAL | 1691 |
| ANSSM | 893 | RGDRQSL | 1692 |
| ANSSM | 894 | RGDRQYL | 1693 |
| ANSSS | 895 | RGDRGSL | 1694 |
| ANSSS | 896 | RGDRGYL | 1695 |
| ANSSS | 897 | RGDRQAL | 1696 |
| ANSSS | 898 | RGDRQSL | 1697 |
| ANSSS | 899 | RGDRQYL | 1698 |
| ANSST | 900 | RGDRAAL | 1699 |
| ANSST | 901 | RGDRGSL | 1700 |
| ANSST | 902 | RGDRQAL | 1701 |
| ANSST | 903 | RGDRQSL | 1702 |
| ANSST | 904 | RGDRQYL | 1703 |
| ANSSV | 905 | RGDRAYL | 1704 |
| ANSSV | 906 | RGDRGYL | 1705 |
| ANSSV | 907 | RGDRQAL | 1706 |
| ANSSV | 908 | RGDRQSL | 1707 |
| ANSSV | 909 | RGDRQYL | 1708 |
| ANTSA | 910 | RGDRAYL | 1709 |
| ANTSA | 911 | RGDRGAL | 1710 |
| ANTSA | 912 | RGDRGSL | 1711 |
| ANTSA | 913 | RGDRGYL | 1712 |
| ANTSA | 914 | RGDRQAL | 1713 |
| ANTSA | 915 | RGDRQYL | 1714 |
| ANTSG | 916 | RGDRASL | 1715 |
| ANTSG | 917 | RGDRGAL | 1716 |
| ANTSG | 918 | RGDRGSL | 1717 |
| ANTSG | 919 | RGDRGYL | 1718 |
| ANTSG | 920 | RGDRQAL | 1719 |
| ANTSG | 921 | RGDRQSL | 1720 |
| ANTSG | 922 | RGDRQYL | 1721 |
| ANTSM | 923 | RGDRAYL | 1722 |
| ANTSM | 924 | RGDRQAL | 1723 |
| ANTSM | 925 | RGDRQSL | 1724 |
| ANTSM | 926 | RGDRQYL | 1725 |
| ANTSS | 927 | RGDRGSL | 1726 |
| ANTSS | 928 | RGDRQAL | 1727 |
| ANTSS | 929 | RGDRQYL | 1728 |
| ANTST | 930 | RGDRAAL | 1729 |
| ANTST | 931 | RGDRQAL | 1730 |
| ANTST | 932 | RGDRQSL | 1731 |
| ANTST | 933 | RGDRQYL | 1732 |
| ANTSV | 934 | RGDRAYL | 1733 |
| ANTSV | 935 | RGDRGSL | 1734 |
| ANTSV | 936 | RGDRQAL | 1735 |
| ANTSV | 937 | RGDRQSL | 1736 |
| ANTSV | 938 | RGDRQYL | 1737 |
| ANYPH | 939 | RGDRGAL | 1738 |
| ANYSA | 940 | RGDRAAL | 1739 |
| ANYSA | 941 | RGDRASL | 1740 |
| ANYSA | 942 | RGDRGAL | 1741 |
| ANYSA | 943 | RGDRGSL | 1742 |
| ANYSA | 944 | RGDRQAL | 1743 |
| ANYSA | 945 | RGDRQSL | 1744 |
| ANYSG | 946 | RGDRAAL | 1745 |
| ANYSG | 947 | RGDRASL | 1746 |
| ANYSG | 948 | RGDRGAL | 1747 |
| ANYSG | 949 | RGDRGSL | 1748 |
| ANYSG | 950 | RGDRQAL | 1749 |
| ANYSG | 951 | RGDRQSL | 1750 |
| ANYSG | 952 | RGDRQYL | 1751 |
| ANYSM | 953 | RGDRAAL | 1752 |
| ANYSM | 954 | RGDRASL | 1753 |
| ANYSM | 955 | RGDRAYL | 1754 |
| ANYSM | 956 | RGDRQAL | 1755 |
| ANYSM | 957 | RGDRQSL | 1756 |
| ANYSS | 958 | RGDRGAL | 1757 |
| ANYSS | 959 | RGDRGSL | 1758 |
| ANYSS | 960 | RGDRQAL | 1759 |
| ANYSS | 961 | RGDRQSL | 1760 |
| ANYSS | 962 | RGDRQYL | 1761 |
| ANYST | 963 | RGDRQAL | 1762 |
| ANYST | 964 | RGDRQSL | 1763 |
| ANYST | 965 | RGDRQYL | 1764 |
| ANYSV | 966 | RGDRQAL | 1765 |
| ANYSV | 967 | RGDRQSL | 1766 |
| ANYSV | 968 | RGDRQYL | 1767 |
| FNSGM | 969 | RGDRGAL | 1768 |
| GNSGM | 970 | RGDRGAL | 1769 |
| HNSGM | 971 | RGDRGAL | 1770 |
| LNASA | 972 | RGDRAAL | 1771 |
| LNASA | 973 | RGDRASL | 1772 |
| LNASA | 974 | RGDRAYL | 1773 |
| LNASA | 975 | RGDRGAL | 1774 |
| LNASA | 976 | RGDRGSL | 1775 |
| LNASA | 977 | RGDRGYL | 1776 |
| LNASA | 978 | RGDRQAL | 1777 |
| LNASA | 979 | RGDRQSL | 1778 |
| LNASA | 980 | RGDRQYL | 1779 |
| LNASG | 981 | RGDRAAL | 1780 |
| LNASG | 982 | RGDRASL | 1781 |
| LNASG | 983 | RGDRAYL | 1782 |
| LNASG | 984 | RGDRGAL | 1783 |
| LNASG | 985 | RGDRGSL | 1784 |
| LNASG | 986 | RGDRGYL | 1785 |
| LNASG | 987 | RGDRQAL | 1786 |
| LNASG | 988 | RGDRQSL | 1787 |
| LNASG | 989 | RGDRQYL | 1788 |
| LNASI | 990 | RGDRQLL | 1789 |
| LNASM | 991 | RGDRAAL | 1790 |
| LNASM | 992 | RGDRASL | 1791 |
| LNASM | 993 | RGDRAYL | 1792 |
| LNASM | 994 | RGDRGAL | 1793 |
| LNASM | 995 | RGDRGSL | 1794 |
| LNASM | 996 | RGDRGYL | 1795 |
| LNASM | 997 | RGDRQAL | 1796 |
| LNASM | 998 | RGDRQSL | 1797 |
| LNASM | 999 | RGDRQYL | 1798 |
| LNASS | 1000 | RGDRAAL | 1799 |
| LNASS | 1001 | RGDRASL | 1800 |
| LNASS | 1002 | RGDRGAL | 1801 |
| LNASS | 1003 | RGDRGSL | 1802 |
| LNASS | 1004 | RGDRQAL | 1803 |
| LNASS | 1005 | RGDRQSL | 1804 |
| LNASS | 1006 | RGDRQYL | 1805 |
| LNAST | 1007 | RGDRAAL | 1806 |
| LNAST | 1008 | RGDRASL | 1807 |
| LNAST | 1009 | RGDRGAL | 1808 |
| LNAST | 1010 | RGDRGSL | 1809 |
| LNAST | 1011 | RGDRGYL | 1810 |
| LNAST | 1012 | RGDRQAL | 1811 |
| LNAST | 1013 | RGDRQSL | 1812 |
| LNAST | 1014 | RGDRQYL | 1813 |
| LNASV | 1015 | RGDRAAL | 1814 |
| LNASV | 1016 | RGDRASL | 1815 |
| LNASV | 1017 | RGDRGAL | 1816 |
| LNASV | 1018 | RGDRGSL | 1817 |
| LNASV | 1019 | RGDRQAL | 1818 |
| LNASV | 1020 | RGDRQSL | 1819 |
| LNASV | 1021 | RGDRQYL | 1820 |
| LNGNF | 1022 | RGDRQNL | 1821 |
| LNGNV | 1023 | RGDRGML | 1822 |
| LNGSA | 1024 | RGDRAAL | 1823 |
| LNGSA | 1025 | RGDRAYL | 1824 |
| LNGSA | 1026 | RGDRGSL | 1825 |
| LNGSA | 1027 | RGDRGYL | 1826 |
| LNGSA | 1028 | RGDRQAL | 1827 |
| LNGSA | 1029 | RGDRQSL | 1828 |
| LNGSA | 1030 | RGDRQYL | 1829 |
| LNGSG | 1031 | RGDRAAL | 1830 |
| LNGSG | 1032 | RGDRAYL | 1831 |
| LNGSG | 1033 | RGDRGAL | 1832 |
| LNGSG | 1034 | RGDRGSL | 1833 |
| LNGSG | 1035 | RGDRGYL | 1834 |
| LNGSG | 1036 | RGDRQAL | 1835 |
| LNGSG | 1037 | RGDRQYL | 1836 |
| LNGSM | 1038 | RGDRASL | 1837 |
| LNGSM | 1039 | RGDRGYL | 1838 |
| LNGSM | 1040 | RGDRQAL | 1839 |
| LNGSM | 1041 | RGDRQSL | 1840 |
| LNGSM | 1042 | RGDRQYL | 1841 |
| LNGSS | 1043 | RGDRAAL | 1842 |
| LNGSS | 1044 | RGDRAYL | 1843 |
| LNGSS | 1045 | RGDRGAL | 1844 |
| LNGSS | 1046 | RGDRQYL | 1845 |
| LNGST | 1047 | RGDRAAL | 1846 |
| LNGST | 1048 | RGDRASL | 1847 |
| LNGST | 1049 | RGDRAYL | 1848 |
| LNGST | 1050 | RGDRGAL | 1849 |
| LNGST | 1051 | RGDRGSL | 1850 |
| LNGST | 1052 | RGDRGYL | 1851 |
| LNGST | 1053 | RGDRQAL | 1852 |
| LNGST | 1054 | RGDRQSL | 1853 |
| LNGST | 1055 | RGDRQYL | 1854 |
| LNGSV | 1056 | RGDRASL | 1855 |
| LNGSV | 1057 | RGDRAYL | 1856 |
| LNGSV | 1058 | RGDRGYL | 1857 |
| LNGSV | 1059 | RGDRQAL | 1858 |
| LNGSV | 1060 | RGDRQSL | 1859 |
| LNGSV | 1061 | RGDRQYL | 1860 |
| LNSGM | 1062 | RGDRGAL | 1861 |
| LNSSA | 1063 | RGDRASL | 1862 |
| LNSSA | 1064 | RGDRAYL | 1863 |
| LNSSA | 1065 | RGDRGAL | 1864 |
| LNSSA | 1066 | RGDRGIL | 1865 |
| LNSSA | 1067 | RGDRGSL | 1866 |
| LNSSA | 1068 | RGDRGYL | 1867 |
| LNSSA | 1069 | RGDRQAL | 1868 |
| LNSSA | 1070 | RGDRQSL | 1869 |
| LNSSA | 1071 | RGDRQYL | 1870 |
| LNSSG | 1072 | RGDRAAL | 1871 |
| LNSSG | 1073 | RGDRASL | 1872 |
| LNSSG | 1074 | RGDRAYL | 1873 |
| LNSSG | 1075 | RGDRGAL | 1874 |
| LNSSG | 1076 | RGDRGSL | 1875 |
| LNSSG | 1077 | RGDRGYL | 1876 |
| LNSSG | 1078 | RGDRQAL | 1877 |
| LNSSG | 1079 | RGDRQSL | 1878 |
| LNSSG | 1080 | RGDRQYL | 1879 |
| LNSSM | 1081 | RGDRAAL | 1880 |
| LNSSM | 1082 | RGDRASL | 1881 |
| LNSSM | 1083 | RGDRAYL | 1882 |
| LNSSM | 1084 | RGDRGAL | 1883 |
| LNSSM | 1085 | RGDRGSL | 1884 |
| LNSSM | 1086 | RGDRQAL | 1885 |
| LNSSM | 1087 | RGDRQSL | 1886 |
| LNSSM | 1088 | RGDRQYL | 1887 |
| LNSSS | 1089 | RGDRAAL | 1888 |
| LNSSS | 1090 | RGDRGAL | 1889 |
| LNSSS | 1091 | RGDRGSL | 1890 |
| LNSSS | 1092 | RGDRQAL | 1891 |
| LNSSS | 1093 | RGDRQSL | 1892 |
| LNSSS | 1094 | RGDRQYL | 1893 |
| LNSST | 1095 | RGDRAAL | 1894 |
| LNSST | 1096 | RGDRASL | 1895 |
| LNSST | 1097 | RGDRGAL | 1896 |
| LNSST | 1098 | RGDRGSL | 1897 |
| LNSST | 1099 | RGDRQAL | 1898 |
| LNSST | 1100 | RGDRQSL | 1899 |
| LNSST | 1101 | RGDRQYL | 1900 |
| LNSSV | 1102 | RGDRAAL | 1901 |
| LNSSV | 1103 | RGDRASL | 1902 |
| LNSSV | 1104 | RGDRGAL | 1903 |
| LNSSV | 1105 | RGDRGSL | 1904 |
| LNSSV | 1106 | RGDRGYL | 1905 |
| LNSSV | 1107 | RGDRQAL | 1906 |
| LNSSV | 1108 | RGDRQSL | 1907 |
| LNSSV | 1109 | RGDRQYL | 1908 |
| LNTSA | 1110 | RGDRAAL | 1909 |
| LNTSA | 1111 | RGDRASL | 1910 |
| LNTSA | 1112 | RGDRAYL | 1911 |
| LNTSA | 1113 | RGDRGAL | 1912 |
| LNTSA | 1114 | RGDRGSL | 1913 |
| LNTSA | 1115 | RGDRGYL | 1914 |
| LNTSA | 1116 | RGDRQAL | 1915 |
| LNTSA | 1117 | RGDRQSL | 1916 |
| LNTSA | 1118 | RGDRQYL | 1917 |
| LNTSG | 1119 | RGDRAAL | 1918 |
| LNTSG | 1120 | RGDRASL | 1919 |
| LNTSG | 1121 | RGDRAYL | 1920 |
| LNTSG | 1122 | RGDRGAL | 1921 |
| LNTSG | 1123 | RGDRGSL | 1922 |
| LNTSG | 1124 | RGDRGYL | 1923 |
| LNTSG | 1125 | RGDRQAL | 1924 |
| LNTSG | 1126 | RGDRQSL | 1925 |
| LNTSG | 1127 | RGDRQYL | 1926 |
| LNTSM | 1128 | RGDRAAL | 1927 |
| LNTSM | 1129 | RGDRASL | 1928 |
| LNTSM | 1130 | RGDRAYL | 1929 |
| LNTSM | 1131 | RGDRGAL | 1930 |
| LNTSM | 1132 | RGDRGSL | 1931 |
| LNTSM | 1133 | RGDRQAL | 1932 |
| LNTSM | 1134 | RGDRQSL | 1933 |
| LNTSM | 1135 | RGDRQYL | 1934 |
| LNTSS | 1136 | RGDRAAL | 1935 |
| LNTSS | 1137 | RGDRGSL | 1936 |
| LNTSS | 1138 | RGDRQAL | 1937 |
| LNTSS | 1139 | RGDRQSL | 1938 |
| LNTSS | 1140 | RGDRQYL | 1939 |
| LNTST | 1141 | RGDRAAL | 1940 |
| LNTST | 1142 | RGDRASL | 1941 |
| LNTST | 1143 | RGDRGAL | 1942 |
| LNTST | 1144 | RGDRGSL | 1943 |
| LNTST | 1145 | RGDRQAL | 1944 |
| LNTST | 1146 | RGDRQSL | 1945 |
| LNTST | 1147 | RGDRQYL | 1946 |
| LNTSV | 1148 | RGDRAAL | 1947 |
| LNTSV | 1149 | RGDRASL | 1948 |
| LNTSV | 1150 | RGDRAYL | 1949 |
| LNTSV | 1151 | RGDRGAL | 1950 |
| LNTSV | 1152 | RGDRGSL | 1951 |
| LNTSV | 1153 | RGDRQAL | 1952 |
| LNTSV | 1154 | RGDRQSL | 1953 |
| LNYPH | 1155 | RGDRGAL | 1954 |
| LNYSA | 1156 | RGDRGAL | 1955 |
| LNYSA | 1157 | RGDRGSL | 1956 |
| LNYSA | 1158 | RGDRQAL | 1957 |
| LNYSA | 1159 | RGDRQSL | 1958 |
| LNYSA | 1160 | RGDRQYL | 1959 |
| LNYSG | 1161 | RGDRAAL | 1960 |
| LNYSG | 1162 | RGDRASL | 1961 |
| LNYSG | 1163 | RGDRGAL | 1962 |
| LNYSG | 1164 | RGDRGSL | 1963 |
| LNYSG | 1165 | RGDRQAL | 1964 |
| LNYSG | 1166 | RGDRQSL | 1965 |
| LNYSG | 1167 | RGDRQYL | 1966 |
| LNYSM | 1168 | RGDRQAL | 1967 |
| LNYSM | 1169 | RGDRQSL | 1968 |
| LNYSS | 1170 | RGDRGAL | 1969 |
| LNYSS | 1171 | RGDRGSL | 1970 |
| LNYSS | 1172 | RGDRQAL | 1971 |
| LNYSS | 1173 | RGDRQSL | 1972 |
| LNYSS | 1174 | RGDRQYL | 1973 |
| LNYST | 1175 | RGDRASL | 1974 |
| LNYST | 1176 | RGDRGAL | 1975 |
| LNYST | 1177 | RGDRGSL | 1976 |
| LNYST | 1178 | RGDRQAL | 1977 |
| LNYST | 1179 | RGDRQSL | 1978 |
| LNYST | 1180 | RGDRQYL | 1979 |
| LNYSV | 1181 | RGDRQAL | 1980 |
| LNYSV | 1182 | RGDRQSL | 1981 |
| MNASA | 1183 | RGDRAAL | 1982 |
| MNASA | 1184 | RGDRAYL | 1983 |
| MNASA | 1185 | RGDRGSL | 1984 |
| MNASA | 1186 | RGDRGYL | 1985 |
| MNASA | 1187 | RGDRQAL | 1986 |
| MNASA | 1188 | RGDRQSL | 1987 |
| MNASA | 1189 | RGDRQYL | 1988 |
| MNASG | 1190 | RGDRAAL | 1989 |
| MNASG | 1191 | RGDRASL | 1990 |
| MNASG | 1192 | RGDRAYL | 1991 |
| MNASG | 1193 | RGDRGSL | 1992 |
| MNASG | 1194 | RGDRQAL | 1993 |
| MNASG | 1195 | RGDRQSL | 1994 |
| MNASG | 1196 | RGDRQYL | 1995 |
| MNASI | 1197 | RGDRQLL | 1996 |
| MNASM | 1198 | RGDRAAL | 1997 |
| MNASM | 1199 | RGDRAYL | 1998 |
| MNASM | 1200 | RGDRGAL | 1999 |
| MNASM | 1201 | RGDRQAL | 2000 |
| MNASM | 1202 | RGDRQSL | 2001 |
| MNASS | 1203 | RGDRAAL | 2002 |
| MNAST | 1204 | RGDRAAL | 2003 |
| MNAST | 1205 | RGDRASL | 2004 |
| MNAST | 1206 | RGDRAYL | 2005 |
| MNAST | 1207 | RGDRGAL | 2006 |
| MNAST | 1208 | RGDRGSL | 2007 |
| MNAST | 1209 | RGDRQAL | 2008 |
| MNAST | 1210 | RGDRQSL | 2009 |
| MNAST | 1211 | RGDRQYL | 2010 |
| MNASV | 1212 | RGDRAAL | 2011 |
| MNASV | 1213 | RGDRASL | 2012 |
| MNASV | 1214 | RGDRAYL | 2013 |
| MNASV | 1215 | RGDRQAL | 2014 |
| MNASV | 1216 | RGDRQSL | 2015 |
| MNASV | 1217 | RGDRQYL | 2016 |
| MNGNF | 1218 | RGDRQNL | 2017 |
| MNGSA | 1219 | RGDRAYL | 2018 |
| MNGSA | 1220 | RGDRGYL | 2019 |
| MNGSA | 1221 | RGDRQAL | 2020 |
| MNGSA | 1222 | RGDRQSL | 2021 |
| MNGSA | 1223 | RGDRQYL | 2022 |
| MNGSG | 1224 | RGDRAAL | 2023 |
| MNGSG | 1225 | RGDRAYL | 2024 |
| MNGSG | 1226 | RGDRGAL | 2025 |
| MNGSG | 1227 | RGDRGSL | 2026 |
| MNGSG | 1228 | RGDRGYL | 2027 |
| MNGSG | 1229 | RGDRQAL | 2028 |
| MNGSG | 1230 | RGDRQSL | 2029 |
| MNGSG | 1231 | RGDRQYL | 2030 |
| MNGSM | 1232 | RGDRQAL | 2031 |
| MNGSM | 1233 | RGDRQSL | 2032 |
| MNGSM | 1234 | RGDRQYL | 2033 |
| MNGSS | 1235 | RGDRQYL | 2034 |
| MNGST | 1236 | RGDRAYL | 2035 |
| MNGST | 1237 | RGDRGAL | 2036 |
| MNGST | 1238 | RGDRGYL | 2037 |
| MNGST | 1239 | RGDRQAL | 2038 |
| MNGST | 1240 | RGDRQSL | 2039 |
| MNGST | 1241 | RGDRQYL | 2040 |
| MNGSV | 1242 | RGDRGYL | 2041 |
| MNGSV | 1243 | RGDRQAL | 2042 |
| MNGSV | 1244 | RGDRQYL | 2043 |
| MNSGM | 1245 | RGDRGAL | 2044 |
| MNSSA | 1246 | RGDRAAL | 2045 |
| MNSSA | 1247 | RGDRAYL | 2046 |
| MNSSA | 1248 | RGDRGSL | 2047 |
| MNSSA | 1249 | RGDRGYL | 2048 |
| MNSSA | 1250 | RGDRQAL | 2049 |
| MNSSA | 1251 | RGDRQSL | 2050 |
| MNSSA | 1252 | RGDRQYL | 2051 |
| MNSSG | 1253 | RGDRAAL | 2052 |
| MNSSG | 1254 | RGDRASL | 2053 |
| MNSSG | 1255 | RGDRAYL | 2054 |
| MNSSG | 1256 | RGDRGAL | 2055 |
| MNSSG | 1257 | RGDRGSL | 2056 |
| MNSSG | 1258 | RGDRQAL | 2057 |
| MNSSG | 1259 | RGDRQSL | 2058 |
| MNSSG | 1260 | RGDRQYL | 2059 |
| MNSSM | 1261 | RGDRAAL | 2060 |
| MNSSM | 1262 | RGDRASL | 2061 |
| MNSSM | 1263 | RGDRAYL | 2062 |
| MNSSM | 1264 | RGDRGSL | 2063 |
| MNSSM | 1265 | RGDRQAL | 2064 |
| MNSSM | 1266 | RGDRQSL | 2065 |
| MNSSM | 1267 | RGDRQYL | 2066 |
| MNSSS | 1268 | RGDRAAL | 2067 |
| MNSST | 1269 | RGDRAAL | 2068 |
| MNSST | 1270 | RGDRASL | 2069 |
| MNSST | 1271 | RGDRQAL | 2070 |
| MNSST | 1272 | RGDRQSL | 2071 |
| MNSST | 1273 | RGDRQYL | 2072 |
| MNSSV | 1274 | RGDRAAL | 2073 |
| MNSSV | 1275 | RGDRAYL | 2074 |
| MNSSV | 1276 | RGDRQAL | 2075 |
| MNSSV | 1277 | RGDRQSL | 2076 |
| MNSSV | 1278 | RGDRQYL | 2077 |
| MNTSA | 1279 | RGDRAYL | 2078 |
| MNTSG | 1280 | RGDRAAL | 2079 |
| MNTSG | 1281 | RGDRQAL | 2080 |
| MNTSG | 1282 | RGDRQYL | 2081 |
| MNTSM | 1283 | RGDRAYL | 2082 |
| MNTST | 1284 | RGDRQYL | 2083 |
| MNYPH | 1285 | RGDRGAL | 2084 |
| MNYSA | 1286 | RGDRAAL | 2085 |
| MNYSA | 1287 | RGDRGYL | 2086 |
| MNYSA | 1288 | RGDRQAL | 2087 |
| MNYSA | 1289 | RGDRQSL | 2088 |
| MNYSG | 1290 | RGDRAAL | 2089 |
| MNYSG | 1291 | RGDRASL | 2090 |
| MNYSG | 1292 | RGDRGSL | 2091 |
| MNYSG | 1293 | RGDRQAL | 2092 |
| MNYSG | 1294 | RGDRQSL | 2093 |
| MNYSS | 1295 | RGDRQAL | 2094 |
| MNYST | 1296 | RGDRAAL | 2095 |
| MNYST | 1297 | RGDRQAL | 2096 |
| MNYST | 1298 | RGDRQSL | 2097 |
| MNYST | 1299 | RGDRQYL | 2098 |
| NNSGM | 1300 | RGDRGAL | 2099 |
| QNSGM | 1301 | RGDRGAL | 2100 |
| SNASA | 1302 | RGDRAAL | 2101 |
| SNASA | 1303 | RGDRASL | 2102 |
| SNASA | 1304 | RGDRAYL | 2103 |
| SNASA | 1305 | RGDRGAL | 2104 |
| SNASA | 1306 | RGDRGSL | 2105 |
| SNASA | 1307 | RGDRGYL | 2106 |
| SNASA | 1308 | RGDRQAL | 2107 |
| SNASA | 1309 | RGDRQSL | 2108 |
| SNASA | 1310 | RGDRQYL | 2109 |
| SNASG | 1311 | RGDRAAL | 2110 |
| SNASG | 1312 | RGDRASL | 2111 |
| SNASG | 1313 | RGDRAYL | 2112 |
| SNASG | 1314 | RGDRGAL | 2113 |
| SNASG | 1315 | RGDRGSL | 2114 |
| SNASG | 1316 | RGDRGYL | 2115 |
| SNASG | 1317 | RGDRQAL | 2116 |
| SNASG | 1318 | RGDRQSL | 2117 |
| SNASG | 1319 | RGDRQYL | 2118 |
| SNASI | 1320 | RGDRQLL | 2119 |
| SNASM | 1321 | RGDRAAL | 2120 |
| SNASM | 1322 | RGDRASL | 2121 |
| SNASM | 1323 | RGDRGAL | 2122 |
| SNASM | 1324 | RGDRGSL | 2123 |
| SNASM | 1325 | RGDRQAL | 2124 |
| SNASM | 1326 | RGDRQSL | 2125 |
| SNASS | 1327 | RGDRAAL | 2126 |
| SNASS | 1328 | RGDRASL | 2127 |
| SNASS | 1329 | RGDRAYL | 2128 |
| SNASS | 1330 | RGDRGAL | 2129 |
| SNASS | 1331 | RGDRGSL | 2130 |
| SNASS | 1332 | RGDRQAL | 2131 |
| SNASS | 1333 | RGDRQSL | 2132 |
| SNASS | 1334 | RGDRQYL | 2133 |
| SNAST | 1335 | RGDRAAL | 2134 |
| SNAST | 1336 | RGDRASL | 2135 |
| SNAST | 1337 | RGDRAYL | 2136 |
| SNAST | 1338 | RGDRGAL | 2137 |
| SNAST | 1339 | RGDRGSL | 2138 |
| SNAST | 1340 | RGDRGYL | 2139 |
| SNAST | 1341 | RGDRQAL | 2140 |
| SNAST | 1342 | RGDRQSL | 2141 |
| SNAST | 1343 | RGDRQYL | 2142 |
| SNASV | 1344 | RGDRAAL | 2143 |
| SNASV | 1345 | RGDRASL | 2144 |
| SNASV | 1346 | RGDRAYL | 2145 |
| SNASV | 1347 | RGDRGSL | 2146 |
| SNASV | 1348 | RGDRGYL | 2147 |
| SNASV | 1349 | RGDRQAL | 2148 |
| SNASV | 1350 | RGDRQSL | 2149 |
| SNASV | 1351 | RGDRQYL | 2150 |
| SNGNF | 1352 | RGDRQNL | 2151 |
| SNGNV | 1353 | RGDRGML | 2152 |
| SNGSA | 1354 | RGDRGYL | 2153 |
| SNGSA | 1355 | RGDRQAL | 2154 |
| SNGSA | 1356 | RGDRQSL | 2155 |
| SNGSA | 1357 | RGDRQYL | 2156 |
| SNGSG | 1358 | RGDRASL | 2157 |
| SNGSG | 1359 | RGDRAYL | 2158 |
| SNGSG | 1360 | RGDRGAL | 2159 |
| SNGSG | 1361 | RGDRGSL | 2160 |
| SNGSG | 1362 | RGDRGYL | 2161 |
| SNGSG | 1363 | RGDRQAL | 2162 |
| SNGSG | 1364 | RGDRQSL | 2163 |
| SNGSG | 1365 | RGDRQYL | 2164 |
| SNGSM | 1366 | RGDRAYL | 2165 |
| SNGSM | 1367 | RGDRGYL | 2166 |
| SNGSM | 1368 | RGDRQAL | 2167 |
| SNGSM | 1369 | RGDRQSL | 2168 |
| SNGSM | 1370 | RGDRQYL | 2169 |
| SNGSS | 1371 | RGDRGYL | 2170 |
| SNGSS | 1372 | RGDRQYL | 2171 |
| SNGST | 1373 | RGDRAAL | 2172 |
| SNGST | 1374 | RGDRASL | 2173 |
| SNGST | 1375 | RGDRGAL | 2174 |
| SNGST | 1376 | RGDRGYL | 2175 |
| SNGST | 1377 | RGDRQAL | 2176 |
| SNGST | 1378 | RGDRQSL | 2177 |
| SNGST | 1379 | RGDRQYL | 2178 |
| SNGSV | 1380 | RGDRGYL | 2179 |
| SNGSV | 1381 | RGDRQAL | 2180 |
| SNGSV | 1382 | RGDRQSL | 2181 |
| SNGSV | 1383 | RGDRQYL | 2182 |
| SNSGM | 1384 | RGDRGAL | 2183 |
| SNSSA | 1385 | RGDRAYL | 2184 |
| SNSSA | 1386 | RGDRGAL | 2185 |
| SNSSA | 1387 | RGDRGIL | 2186 |
| SNSSA | 1388 | RGDRGSL | 2187 |
| SNSSA | 1389 | RGDRGYL | 2188 |
| SNSSA | 1390 | RGDRQAL | 2189 |
| SNSSA | 1391 | RGDRQSL | 2190 |
| SNSSA | 1392 | RGDRQYL | 2191 |
| SNSSG | 1393 | RGDRAAL | 2192 |
| SNSSG | 1394 | RGDRAYL | 2193 |
| SNSSG | 1395 | RGDRGAL | 2194 |
| SNSSG | 1396 | RGDRGSL | 2195 |
| SNSSG | 1397 | RGDRGYL | 2196 |
| SNSSG | 1398 | RGDRQAL | 2197 |
| SNSSG | 1399 | RGDRQSL | 2198 |
| SNSSG | 1400 | RGDRQYL | 2199 |
| SNSSM | 1401 | RGDRAAL | 2200 |
| SNSSM | 1402 | RGDRASL | 2201 |
| SNSSM | 1403 | RGDRAYL | 2202 |
| SNSSM | 1404 | RGDRGSL | 2203 |
| SNSSM | 1405 | RGDRQAL | 2204 |
| SNSSM | 1406 | RGDRQSL | 2205 |
| SNSSM | 1407 | RGDRQYL | 2206 |
| SNSSS | 1408 | RGDRAAL | 2207 |
| SNSSS | 1409 | RGDRGSL | 2208 |
| SNSSS | 1410 | RGDRQAL | 2209 |
| SNSSS | 1411 | RGDRQSL | 2210 |
| SNSSS | 1412 | RGDRQYL | 2211 |
| SNSST | 1413 | RGDRAAL | 2212 |
| SNSST | 1414 | RGDRASL | 2213 |
| SNSST | 1415 | RGDRGSL | 2214 |
| SNSST | 1416 | RGDRGYL | 2215 |
| SNSST | 1417 | RGDRQAL | 2216 |
| SNSST | 1418 | RGDRQSL | 2217 |
| SNSST | 1419 | RGDRQYL | 2218 |
| SNSSV | 1420 | RGDRQAL | 2219 |
| SNSSV | 1421 | RGDRQSL | 2220 |
| SNSSV | 1422 | RGDRQYL | 2221 |
| SNTSA | 1423 | RGDRAAL | 2222 |
| SNTSA | 1424 | RGDRGAL | 2223 |
| SNTSA | 1425 | RGDRGSL | 2224 |
| SNTSA | 1426 | RGDRGYL | 2225 |
| SNTSA | 1427 | RGDRQAL | 2226 |
| SNTSA | 1428 | RGDRQSL | 2227 |
| SNTSA | 1429 | RGDRQYL | 2228 |
| SNTSG | 1430 | RGDRAAL | 2229 |
| SNTSG | 1431 | RGDRASL | 2230 |
| SNTSG | 1432 | RGDRGAL | 2231 |
| SNTSG | 1433 | RGDRGSL | 2232 |
| SNTSG | 1434 | RGDRGYL | 2233 |
| SNTSG | 1435 | RGDRQAL | 2234 |
| SNTSG | 1436 | RGDRQSL | 2235 |
| SNTSG | 1437 | RGDRQYL | 2236 |
| SNTSM | 1438 | RGDRAYL | 2237 |
| SNTSM | 1439 | RGDRGSL | 2238 |
| SNTSM | 1440 | RGDRQAL | 2239 |
| SNTSM | 1441 | RGDRQSL | 2240 |
| SNTSS | 1442 | RGDRQAL | 2241 |
| SNTST | 1443 | RGDRQAL | 2242 |
| SNTST | 1444 | RGDRQSL | 2243 |
| SNTST | 1445 | RGDRQYL | 2244 |
| SNTSV | 1446 | RGDRAYL | 2245 |
| SNTSV | 1447 | RGDRQAL | 2246 |
| SNTSV | 1448 | RGDRQSL | 2247 |
| SNTSV | 1449 | RGDRQYL | 2248 |
| SNYPH | 1450 | RGDRGAL | 2249 |
| SNYSA | 1451 | RGDRAAL | 2250 |
| SNYSA | 1452 | RGDRASL | 2251 |
| SNYSA | 1453 | RGDRGAL | 2252 |
| SNYSA | 1454 | RGDRGSL | 2253 |
| SNYSA | 1455 | RGDRQAL | 2254 |
| SNYSA | 1456 | RGDRQSL | 2255 |
| SNYSA | 1457 | RGDRQYL | 2256 |
| SNYSG | 1458 | RGDRAAL | 2257 |
| SNYSG | 1459 | RGDRGAL | 2258 |
| SNYSG | 1460 | RGDRGSL | 2259 |
| SNYSG | 1461 | RGDRQAL | 2260 |
| SNYSG | 1462 | RGDRQSL | 2261 |
| SNYSM | 1463 | RGDRAAL | 2262 |
| SNYSM | 1464 | RGDRASL | 2263 |
| SNYSM | 1465 | RGDRGSL | 2264 |
| SNYSM | 1466 | RGDRQAL | 2265 |
| SNYSM | 1467 | RGDRQSL | 2266 |
| SNYSS | 1468 | RGDRGAL | 2267 |
| SNYSS | 1469 | RGDRGSL | 2268 |
| SNYSS | 1470 | RGDRQAL | 2269 |
| SNYSS | 1471 | RGDRQSL | 2270 |
| SNYST | 1472 | RGDRAAL | 2271 |
| SNYST | 1473 | RGDRGAL | 2272 |
| SNYST | 1474 | RGDRGSL | 2273 |
| SNYST | 1475 | RGDRQAL | 2274 |
| SNYST | 1476 | RGDRQSL | 2275 |
| SNYST | 1477 | RGDRQYL | 2276 |
| SNYSV | 1478 | RGDRQAL | 2277 |
| SNYSV | 1479 | RGDRQSL | 2278 |
| SNYSV | 1480 | RGDRQYL | 2279 |
| TNSGM | 1481 | RGDRGAL | 2280 |
| VNASA | 1482 | RGDRAAL | 2281 |
| VNASA | 1483 | RGDRGAL | 2282 |
| VNASA | 1484 | RGDRGSL | 2283 |
| VNASA | 1485 | RGDRGYL | 2284 |
| VNASA | 1486 | RGDRQAL | 2285 |
| VNASA | 1487 | RGDRQYL | 2286 |
| VNASG | 1488 | RGDRAAL | 2287 |
| VNASG | 1489 | RGDRAYL | 2288 |
| VNASG | 1490 | RGDRGAL | 2289 |
| VNASG | 1491 | RGDRGSL | 2290 |
| VNASG | 1492 | RGDRGYL | 2291 |
| VNASG | 1493 | RGDRQAL | 2292 |
| VNASG | 1494 | RGDRQYL | 2293 |
| VNASM | 1495 | RGDRAYL | 2294 |
| VNASM | 1496 | RGDRQAL | 2295 |
| VNASM | 1497 | RGDRQSL | 2296 |
| VNASS | 1498 | RGDRGSL | 2297 |
| VNASS | 1499 | RGDRQAL | 2298 |
| VNASS | 1500 | RGDRQYL | 2299 |
| VNAST | 1501 | RGDRAAL | 2300 |
| VNAST | 1502 | RGDRGAL | 2301 |
| VNAST | 1503 | RGDRGSL | 2302 |
| VNAST | 1504 | RGDRGYL | 2303 |
| VNAST | 1505 | RGDRQAL | 2304 |
| VNAST | 1506 | RGDRQSL | 2305 |
| VNAST | 1507 | RGDRQYL | 2306 |
| VNASV | 1508 | RGDRGSL | 2307 |
| VNASV | 1509 | RGDRGYL | 2308 |
| VNASV | 1510 | RGDRQAL | 2309 |
| VNASV | 1511 | RGDRQSL | 2310 |
| VNASV | 1512 | RGDRQYL | 2311 |
| VNGNF | 1513 | RGDRQNL | 2312 |
| VNGNV | 1514 | RGDRGML | 2313 |
| VNGSA | 1515 | RGDRAYL | 2314 |
| VNGSA | 1516 | RGDRGAL | 2315 |
| VNGSA | 1517 | RGDRGSL | 2316 |
| VNGSA | 1518 | RGDRGYL | 2317 |
| VNGSA | 1519 | RGDRQAL | 2318 |
| VNGSA | 1520 | RGDRQSL | 2319 |
| VNGSA | 1521 | RGDRQYL | 2320 |
| VNGSG | 1522 | RGDRAAL | 2321 |
| VNGSG | 1523 | RGDRASL | 2322 |
| VNGSG | 1524 | RGDRAYL | 2323 |
| VNGSG | 1525 | RGDRGAL | 2324 |
| VNGSG | 1526 | RGDRGSL | 2325 |
| VNGSG | 1527 | RGDRGYL | 2326 |
| VNGSG | 1528 | RGDRQAL | 2327 |
| VNGSG | 1529 | RGDRQSL | 2328 |
| VNGSG | 1530 | RGDRQYL | 2329 |
| VNGSM | 1531 | RGDRGYL | 2330 |
| VNGSM | 1532 | RGDRQAL | 2331 |
| VNGSM | 1533 | RGDRQSL | 2332 |
| VNGSM | 1534 | RGDRQYL | 2333 |
| VNGSS | 1535 | RGDRAYL | 2334 |
| VNGSS | 1536 | RGDRGAL | 2335 |
| VNGSS | 1537 | RGDRGSL | 2336 |
| VNGSS | 1538 | RGDRQAL | 2337 |
| VNGSS | 1539 | RGDRQSL | 2338 |
| VNGSS | 1540 | RGDRQYL | 2339 |
| VNGST | 1541 | RGDRAAL | 2340 |
| VNGST | 1542 | RGDRAYL | 2341 |
| VNGST | 1543 | RGDRGAL | 2342 |
| VNGST | 1544 | RGDRGYL | 2343 |
| VNGST | 1545 | RGDRQAL | 2344 |
| VNGST | 1546 | RGDRQSL | 2345 |
| VNGST | 1547 | RGDRQYL | 2346 |
| VNGSV | 1548 | RGDRAYL | 2347 |
| VNGSV | 1549 | RGDRQAL | 2348 |
| VNGSV | 1550 | RGDRQSL | 2349 |
| VNGSV | 1551 | RGDRQYL | 2350 |
| VNSGM | 1552 | RGDRGAL | 2351 |
| VNSSA | 1553 | RGDRGAL | 2352 |
| VNSSA | 1554 | RGDRGSL | 2353 |
| VNSSA | 1555 | RGDRGYL | 2354 |
| VNSSA | 1556 | RGDRQAL | 2355 |
| VNSSA | 1557 | RGDRQSL | 2356 |
| VNSSA | 1558 | RGDRQYL | 2357 |
| VNSSG | 1559 | RGDRAAL | 2358 |
| VNSSG | 1560 | RGDRAYL | 2359 |
| VNSSG | 1561 | RGDRGAL | 2360 |
| VNSSG | 1562 | RGDRQAL | 2361 |
| VNSSG | 1563 | RGDRQSL | 2362 |
| VNSSG | 1564 | RGDRQYL | 2363 |
| VNSSM | 1565 | RGDRAYL | 2364 |
| VNSSM | 1566 | RGDRQAL | 2365 |
| VNSSM | 1567 | RGDRQSL | 2366 |
| VNSSM | 1568 | RGDRQYL | 2367 |
| VNSSS | 1569 | RGDRGSL | 2368 |
| VNSSS | 1570 | RGDRQAL | 2369 |
| VNSSS | 1571 | RGDRQSL | 2370 |
| VNSST | 1572 | RGDRGAL | 2371 |
| VNSST | 1573 | RGDRQAL | 2372 |
| VNSST | 1574 | RGDRQSL | 2373 |
| VNSST | 1575 | RGDRQYL | 2374 |
| VNSSV | 1576 | RGDRAYL | 2375 |
| VNSSV | 1577 | RGDRQAL | 2376 |
| VNSSV | 1578 | RGDRQSL | 2377 |
| VNTSA | 1579 | RGDRAYL | 2378 |
| VNTSG | 1580 | RGDRAAL | 2379 |
| VNTSG | 1581 | RGDRGAL | 2380 |
| VNTSG | 1582 | RGDRGSL | 2381 |
| VNTSG | 1583 | RGDRGYL | 2382 |
| VNTSG | 1584 | RGDRQAL | 2383 |
| VNTSG | 1585 | RGDRQSL | 2384 |
| VNTSG | 1586 | RGDRQYL | 2385 |
| VNTST | 1587 | RGDRAYL | 2386 |
| VNYPH | 1588 | RGDRGAL | 2387 |
| VNYSA | 1589 | RGDRGAL | 2388 |
| VNYSA | 1590 | RGDRGSL | 2389 |
| VNYSA | 1591 | RGDRQAL | 2390 |
| VNYSA | 1592 | RGDRQSL | 2391 |
| VNYSG | 1593 | RGDRAAL | 2392 |
| VNYSG | 1594 | RGDRGAL | 2393 |
| VNYSG | 1595 | RGDRQAL | 2394 |
| VNYSG | 1596 | RGDRQSL | 2395 |
| VNYSG | 1597 | RGDRQYL | 2396 |
| VNYSS | 1598 | RGDRGSL | 2397 |
| VNYSS | 1599 | RGDRGYL | 2398 |

### BRIEF DESCRIPTION OF THE DRAWINGS

[0019] FIG. 1 is a schematic of the novel platform of the invention.

[0020] FIG. 2 is a schematic of the novel capsid platform of the invention.

[0021] FIG. 3A show images of fluorescence in tissues following administration of capsids of the invention.

[0022] FIG. 3B shows graphs of transgene mRNA in tissues following administration of capsids of the invention.

[0023] FIG. 4A-B show graphs of relative luminescence in mouse and human primary myotubules following administration of capsids of the invention.

[0024] FIG. 5A-5B shows graphs of transduction percentage in mouse and human primary myotubules following administration of capsids of the invention.

[0025] FIG. 6 is a graph of probability of survival following capsid and transgene administration in Mtm1 knockout mice.

[0026] FIG. 7 is an image of MTM1 levels in non-human primate skeletal muscle following capsid and transgene administration.

[0027] FIG. 8 shows images of fluorescence in tissues following administration of capsids of the invention.

[0028] FIG. 9A-B show mRNA transgene expression levels in NHP skeletal muscle following administration of capsids of the invention.

[0029] FIG. 10A-B show mRNA transgene expression levels in NHP cardiac muscle following administration of capsids of the invention.

[0030] FIG. 11A-B show mRNA transgene expression levels in NHP liver following administration of capsids of the invention.

[0031] FIG. 12A-B show mRNA transgene expression levels in NHP dorsal root ganglia (DRG) following administration of capsids of the invention.

[0032] FIG. 1-25 are Appendix A providing results from capsids of the invention (MyoAAV-LD 6).

### DETAILED DESCRIPTION

[0033] The present invention provides novel capsid protein variants for viral vectors that detarget liver tissue and target skeletal muscle and heart tissue at the same time. Aspects of the present invention provide adeno-associated virus (AAV) vector's comprising a capsid protein comprising the amino acid sequence RGDR. In the capsid protein, RGDR may be inserted after amino acid 455 in reference to an AAV9 capsid or equivalent position in another AAV capsid. For example, capsid proteins variants of the invention may comprise a sequence as set forth in Table 1.

### Adeno Associated Virus Vectors

[0034] AAVs are particularly appropriate viral vectors for delivery of genetic material into mammalian cells. AAVs are not known to cause disease in mammals and cause a very mild immune response. Additionally, AAVs are able to infect cells in multiple stages whether at rest or in a phase of the cell replication cycle. Advantageously, AAV DNA is not regularly inserted into the host's genome at random sites, reducing the oncogenic properties of this vector.

[0035] AAVs have been engineered to deliver a variety of treatments, especially for genetic disorders caused by single nucleotide polymorphisms (“SNP”). Genetic diseases that have been studied in conjunction with AAV vectors include Cystic fibrosis, hemophilia, arthritis, macular degeneration, muscular dystrophy, Parkinson's disease, congestive heart failure, and Alzheimer's disease. The AAV can be used as a vector to deliver engineered nucleic acid to a host and utilize the host's own ribosomes to transcribe that nucleic acid into the desired proteins. See, e.g., West et al., Virology 160:38-47 (1987); U.S. Pat. No. 4,797,368; WO 93/24641; Kotin, Human Gene Therapy 5:793-801 (1994); and Muzyczka, J. Clin. Invest. 94:1351 (1994). AAVs have some deficiency in their replication and/or pathogenicity and thus can be safer that adenoviral vectors. In some embodiments, the AAV can integrate into a specific site on chromosome 19 of a human cell with no observable side effects. In some embodiments, the capacity of the AAV vector, system thereof, and/or AAV particles can be up to about 4.7 kb. The AAV vector or system thereof can include one or more engineered capsid polynucleotides described herein.

[0036] AAVs are small, replication-defective, nonenveloped viruses that infect humans and other primate species and have a linear single-stranded DNA genome. Naturally occurring AAV serotypes exhibit liver tropism. As a result, transfection of non-liver tissue with traditional AAV vectors is impeded by the virus's natural liver tropism. Moreover, because the liver acts to break down substances delivered to a subject, transfection of non-liver tissue with unmodified AAV vectors requires higher dosing to provide sufficient viral load to overcome the liver and reach non-liver tissue. More than 30 naturally occurring serotypes of AAV are available. Many natural variants in the AAV capsid exist. AAV serotypes include, but are not limited to, AAV serotypes AAV1, AAV2, AAV3, AAV3B, AAV4, AAV5, AAV6, AAV7, AAV8, AAV9, AAV10, AAV11, AAV 12, AAV13. AAVs may be engineered using conventional molecular biology techniques, making it possible to optimize these particles, for example, for cell specific delivery, for minimizing immunogenicity, for tuning stability and particle lifetime, for efficient degradation, for accurate delivery to the nucleus. AAV vectors can be specifically targeted to one or more types of cells by choosing the appropriate combination of AAV serotype, promoter, and delivery method.

[0037] Previous approaches to identify AAV sequences correlated with tropism have relied upon the comparison of highly related extant serotypes with distinct characteristics, random domain swaps between unrelated serotypes, or consideration of higher-order structure, to identify motifs that define liver tropism. For example, mapping determinants of AAV tropism have been carried out by comparing highly related serotypes. One such example is the single-amino acid change (E531K) between AAV1 and AAV6 that improves murine liver transduction in AAV1. See Wu et al. (2006) J. Virol., 80 (22): 11393-7, incorporated by reference herein. Another example is a reciprocal domain swap between AAV2 and AAV8 that alters tropism, but fails to define any robust specific tissue-targeting motifs. See Raupp et al. (201) J. Virol., 86 (17): 9396-408, incorporated by reference herein. Further, global consideration of structure has only highlighted gross differences between better- or worse-liver-transducers that are more observational than useful in practice. Nam et al (2007) J. Virol., 81 (22): 12260-71.

[0038] AAVs exhibiting modified tissue tropism that may be used with the present invention are described in U.S. Pat. Nos. 9,695,220, 9,719,070; 10,119,125; 10,526,584; U.S. Patent Application Publication No. 2018-0369414; U.S. Patent Application Publication No. 2020-0123504; U.S. Patent Application Publication No. 2020-0318082; PCT International Patent Application Publication No. WO 2015/054653; PCT International Patent Application Publication No. WO 2016/179496; PCT International Patent Application Publication No. WO 2017/100791; and PCT International Patent Application Publication No. WO 2019/217911, the entirety of the contents of each of which are incorporated by reference herein.

[0039] The AAV vector or system thereof may include one or more regulatory molecules, such as promoters, enhancers, repressors and the like. In some embodiments, the AAV vector or system thereof can include one or more polynucleotides that can encode one or more regulatory proteins. In some embodiments, the one or more regulatory proteins can be selected from Rep78, Rep68, Rep52, Rep40, variants thereof, and combinations thereof. In some embodiments, the muscle specific promoter can drive expression of an engineered AAV capsid polynucleotide.

[0040] The AAV vector or system thereof can include one or more polynucleotides that can encode one or more capsid proteins, such as the engineered AAV capsid proteins described elsewhere herein. The engineered capsid proteins can be capable of assembling into a protein shell (an engineered capsid) of the AAV virus particle. The engineered capsid can have a cell-, tissue-, and/or organ-specific tropism.

[0041] The AAV vector or system thereof can be configured to produce AAV particles having a specific serotype. In some embodiments, the serotype can be AAV-1, AAV-2, AAV-3, AAV-4, AAV-5, AAV-6, AAV-8, AAV-9 or any combinations thereof. In some embodiments, the AAV can be AAV1, AAV-2, AAV-5, AAV-9 or any combination thereof. One can select the AAV of the AAV with regard to the cells to be targeted; e.g., one can select AAV serotypes 1, 2, 5, 9 or a hybrid capsid AAV-1, AAV-2, AAV-5, AAV-9 or any combination thereof for targeting brain and/or neuronal cells; and one can select AAV-4 for targeting cardiac tissue; and one can select AAV-8 for delivery to the liver. Thus, in some embodiments, an AAV vector or system thereof capable of producing AAV particles capable of targeting the brain and/or neuronal cells can be configured to generate AAV particles having serotypes 1, 2, 5 or a hybrid capsid AAV-1, AAV-2, AAV-5 or any combination thereof. In some embodiments, an AAV vector or system thereof capable of producing AAV particles capable of targeting cardiac tissue can be configured to generate an AAV particle having an AAV-4 serotype. In some embodiments, an AAV vector or system thereof capable of producing AAV particles capable of targeting the liver can be configured to generate an AAV having an AAV-8 serotype. See also Srivastava. 2017. Curr. Opin. Virol. 21:75-80.

[0042] It will be appreciated that while the different serotypes can provide some level of cell, tissue, and/or organ specificity, each serotype still is multi-tropic and thus can result in tissue-toxicity if using that serotype to target a tissue that the serotype is less efficient in transducing. Thus, in addition to achieving some tissue targeting capacity via selecting an AAV of a particular serotype, it will be appreciated that the tropism of the AAV serotype can be modified by an engineered AAV capsid described herein. As described elsewhere herein, variants of wild-type AAV of any serotype can be generated via a method described herein and determined to have a particular cell-specific tropism, which can be the same or different as that of the reference wild-type AAV serotype. In some embodiments, the cell, tissue, and/or specificity of the wild-type serotype can be enhanced (e.g., made more selective or specific for a particular cell type that the serotype is already biased towards). For example, wild-type AAV-9 is biased towards muscle and brain in humans (see e.g., Srivastava. 2017. Curr. Opin. Virol. 21:75-80.) By including an engineered AAV capsid and/or capsid protein variant of wild-type AAV-9 as described herein, the tropism for nervous cells might be reduced or eliminated and/or the muscle specificity increased such that the nervous specificity appears reduced in comparison, thus enhancing the specificity for muscle as compared to the wild-type AAV-9. As previously mentioned, inclusion of an engineered capsid and/or capsid protein variant of a wild-type AAV serotype can have a different tropism than the wild-type reference AAV serotype. For example, an engineered AAV capsid and/or capsid protein variant of AAV-9 can have specificity for a tissue other than muscle or brain in humans.

[0043] In some embodiments, the AAV vector is a hybrid AAV vector or system thereof. Hybrid AAVs are AAVs that include genomes with elements from one serotype that are packaged into a capsid derived from at least one different serotype. For example, if it is the rAAV2/5 that is to be produced, and if the production method is based on the helper-free, transient transfection method discussed above, the 1st plasmid and the 3rd plasmid (the adeno helper plasmid) will be the same as discussed for rAAV2 production. However, the 2nd plasmid, the pRepCap will be different. In this plasmid, called pRep2/Cap5, the Rep gene is still derived from AAV2, while the Cap gene is derived from AAV5. The production scheme is the same as the above-mentioned approach for AAV2 production. The resulting rAAV is called rAAV2/5, in which the genome is based on recombinant AAV2, while the capsid is based on AAV5. It is assumed the cell or tissue-tropism displayed by this AAV2/5 hybrid virus should be the same as that of AAV5. It will be appreciated that wild-type hybrid AAV particles suffer the same specificity issues as with the non-hybrid wild-type serotypes previously discussed.

[0044] Advantages achieved by the wild-type based hybrid AAV systems can be combined with the increased and customizable cell-specificity that can be achieved with the engineered AAV capsids can be combined by generating a hybrid AAV that can include an engineered AAV capsid described elsewhere herein. It will be appreciated that hybrid AAVs can contain an engineered AAV capsid containing a genome with elements from a different serotype than the reference wild-type serotype that the engineered AAV capsid is a variant of. For example, a hybrid AAV can be produced that includes an engineered AAV capsid that is a variant of an AAV-9 serotype that is used to package a genome that contains components (e.g., rep elements) from an AAV-2 serotype. As with wild-type based hybrid AAVs previously discussed, the tropism of the resulting AAV particle will be that of the engineered AAV capsid.

[0045] In some embodiments, the AAV vector or system thereof is configured as a “gutless” vector, similar to that described in connection with a retroviral vector. In some embodiments, the “gutless” AAV vector or system thereof can have the cis-acting viral DNA elements involved in genome amplification and packaging in linkage with the heterologous sequences of interest (e.g., the engineered AAV capsid polynucleotide(s)).

[0046] The vectors described herein can be constructed using any suitable process or technique. In some embodiments, one or more suitable recombination and/or cloning methods or techniques can be used to the vector(s) described herein. Suitable recombination and/or cloning techniques and/or methods can include, but not limited to, those described in U.S. Application publication No. US 2004-0171156 A1. Other suitable methods and techniques are described elsewhere herein.

[0047] Construction of recombinant AAV vectors are described in a number of publications, including U.S. Pat. No. 5,173,414; Tratschin et al., Mol. Cell. Biol. 5:3251-3260 (1985); Tratschin, et al., Mol. Cell. Biol. 4:2072-2081 (1984); Hermonat & Muzyczka, PNAS 81:6466-6470 (1984); and Samulski et al., J. Virol. 63:03822-3828 (1989). Any of the techniques and/or methods can be used and/or adapted for constructing an AAV or other vector described herein. AAV vectors are discussed elsewhere herein.

[0048] In some embodiments, the vector can have one or more insertion sites, such as a restriction endonuclease recognition sequence (also referred to as a “cloning site”). In some embodiments, one or more insertion sites (e.g., about or more than about 1, 2, 3, 4, 5, 6, 7, 8, 9, 10, or more insertion sites) are located upstream and/or downstream of one or more sequence elements of one or more vectors.

[0049] Delivery vehicles, vectors, particles, nanoparticles, formulations and components thereof for expression of one or more elements of a engineered AAV capsid system described herein are as used in the foregoing documents, such as International Patent Application Publications WO WO 2021/050974 and WO 2021/077000 and PCT International Application No. PCT/US2021/042812, the contents of which are incorporated by reference herein.

[0050] Additional AAV vectors are described in International Patent Application Publication WO 2019/2071632, the contents of which are incorporated by reference herein.

[0051] Further AAV vectors are described in International Patent Application Publications WO 2020/086881 and WO 2020/235543, the contents of each of which are incorporated by reference herein.

[0052] Further AAV vectors are described in International Patent Application Publications WO 2005/033321; WO 2006/110689; WO 2007/127264; WO 2008/027084; WO 2009/073103; WO 2009/073104; WO 2009/105084; WO 2009/134681; WO 2009/136977; WO 2010/051367; WO 2010/138675; WO 2001/038187; WO 2012/112832; WO 2015/054653; WO 2016/179496; WO 2017/100791; WO 2017/019994; WO 2018/209154; WO 2019/067982; WO 2019/195701; WO 2019/217911; WO 2020/041498; WO 2020/210839; U.S. Pat. Nos. 7,906,111; 9,737,618; 10,265,417; 10,485,883; 10,695,441; 10,722,598; 8,999,678; 10,301,648; 10,626,415; 9,198,984; 10,155,931; 8,524,219; 9,206,238; 8,685,387; 9,359,618; 8,231,880; 8,470,310; 9,597,363; 8,940,290; 9,593,346; 10,501,757; 10,786,568; 10,973,928; 10,519,198; 8,846,031; 9,617,561; 9,884,071; 10,406,173; 9,596,220; 9,719,010; 10,117,125; 10,526,584; 10,881,548; 10,738,087; U.S. Patent Publication No. 2011-023353; U.S. Patent Publication No. 2019-0015527; U.S. Patent Publication No. 2020-155704; U.S. Patent Publication No 2017-0191079; U.S. Patent Publication No. 2019-0218574; U.S. Patent Publication No. 2020-0208176; U.S. Patent Publication No. 2020-0325491; U.S. Patent Publication No. 2019-0055523; U.S. Patent Publication No. 2020-0385689; U.S. Patent Publication No. 2009-0317417; U.S. Patent Publication No. 2016-0051603; U.S. Patent Publication No. 2016-00244783; U.S. Patent Publication No. 2017-0183636; U.S. Patent Publication No. 2020-0263201; U.S. Patent Publication No. 2020-0101099; U.S. Patent Publication No. 2020-0318082; U.S. Patent Publication No. 2018-0369414; U.S. Patent Publication No. 2019-0330278; U.S. Patent Publication No. 2020-0231986, the contents of each of which are incorporated by reference herein.

### Capsid Protein

[0053] The capsid protein is the shell or coating of the virus that enables its delivery into the host. Without the protein, the nucleic acids would be destroyed by the host without entering into the host cells and beginning transcription and translation. The capsid protein may be in the natural conformation of a naturally occurring AAV, or it may be modified.

[0054] In certain example embodiments, the AAV capsid protein is an engineered AAV capsid protein having reduced or eliminated uptake in a non-muscle cell as compared to a corresponding wild-type AAV capsid polypeptide.

[0055] In some embodiments, the engineered AAV capsid encoding polynucleotide can be included in a polynucleotide that is configured to be an AAV genome donor in an AAV vector system that can be used to generate engineered AAV particles described elsewhere herein. In some embodiments, the engineered AAV capsid encoding polynucleotide can be operably coupled to a poly adenylation tail. In some embodiments, the poly adenylation tail can be an SV40 poly adenylation tail. In some embodiments, the AAV capsid encoding polynucleotide can be operably coupled to a promoter. In some embodiments, the promoter can be a tissue specific promoter. In some embodiments, the tissue specific promoter is specific for muscle (e.g., cardiac, skeletal, and/or smooth muscle), neurons and supporting cells (e.g., astrocytes, glial cells, Schwann cells, etc.), fat, spleen, liver, kidney, immune cells, spinal fluid cells, synovial fluid cells, skin cells, cartilage, tendons, connective tissue, bone, pancreas, adrenal gland, blood cell, bone marrow cells, placenta, endothelial cells, and combinations thereof. In some embodiments, the promoter can be a constitutive promoter. Suitable tissue specific promoters and constitutive promoters are discussed elsewhere herein and are generally known in the art and can be commercially available. Suitable muscle specific promoters include, but are not limited to CK8, MHCK7, Myoglobin promoter (Mb), Desmin promoter, muscle creatine kinase promoter (MCK) and variants thereof, and SPc5-12 synthetic promoter.

[0056] Described herein are various embodiments of engineered viral capsids, such as adeno-associated virus (AAV) capsids, that can be engineered to confer cell-specific tropism, such as muscle specific tropism, to an engineered viral particle. Engineered viral capsids can be lentiviral, retroviral, adenoviral, or AAV capsids. The engineered capsids can be included in an engineered virus particle (e.g., an engineered lentiviral, retroviral, adenoviral, or AAV virus particle), and can confer cell-specific tropism, reduced immunogenicity, or both to the engineered viral particle. The engineered viral capsids described herein can include one or more engineered viral capsid proteins described herein. The engineered viral capsids described herein can include one or more engineered viral capsid proteins described herein that can contain a muscle-specific targeting moiety containing or composed of an n-mer motif described elsewhere herein.

[0057] The engineered viral capsid and/or capsid proteins can be encoded by one or more engineered viral capsid polynucleotides. In some embodiments, the engineered viral capsid polynucleotide is an engineered AAV capsid polynucleotide, engineered lentiviral capsid polynucleotide, engineered retroviral capsid polynucleotide, or engineered adenovirus capsid polynucleotide. In some embodiments, an engineered viral capsid polynucleotide (e.g., an engineered AAV capsid polynucleotide, engineered lentiviral capsid polynucleotide, engineered retroviral capsid polynucleotide, or engineered adenovirus capsid polynucleotide) can include a 3′ polyadenylation signal. The polyadenylation signal can be an SV40 polyadenylation signal.

[0058] The engineered viral capsids can be variants of wild-type viral capsid. For example, in some embodiments, the engineered AAV capsids can be variants of wild-type AAV capsids. In some embodiments, the wild-type AAV capsids can be composed of VP1, VP2, VP3 capsid proteins or a combination thereof. In other words, the engineered AAV capsids can include one or more variants of a wild-type VP1, wild-type VP2, and/or wild-type VP3 capsid proteins. In some embodiments, the serotype of the reference wild-type AAV capsid can be AAV-1, AAV-2, AAV-3, AAV-4, AAV-5, AAV-6, AAV-8, AAV-9 or any combination thereof. In some embodiments, the serotype of the wild-type AAV capsid can be AAV-9. The engineered AAV capsids can have a different tropism than that of the reference wild-type AAV capsid.

[0059] The engineered viral capsid can contain 1-60 engineered capsid proteins. In some embodiments, the engineered viral capsids can contain 1, 2, 3, 4, 5, 6, 7, 8, 9, 10, 11, 12, 13, 14, 15, 16, 17, 18, 19, 20, 21, 22, 23, 24, 25, 26, 27, 28, 29, 30, 31, 32, 33, 34, 35, 36, 37, 38, 39, 40, 41, 42, 43, 44, 45, 46, 47, 48, 49, 50, 51, 52, 53, 54, 55, 56, 57, 58, 59, or 60 engineered capsid proteins. In some embodiments, the engineered viral capsid can contain 0-59 wild-type viral capsid proteins. In some embodiments, the engineered viral capsid can contain 0, 1, 2, 3, 4, 5, 6, 7, 8, 9, 10, 11, 12, 13, 14, 15, 16, 17, 18, 19, 20, 21, 22, 23, 24, 25, 26, 27, 28, 29, 30, 31, 32, 33, 34, 35, 36, 37, 38, 39, 40, 41, 42, 43, 44, 45, 46, 47, 48, 49, 50, 51, 52, 53, 54, 55, 56, 57, 58, or 59 wild-type viral capsid proteins.

[0060] In some embodiments, the engineered AAV capsid can contain 1-60 engineered capsid proteins. In some embodiments, the engineered AAV capsids can contain 1, 2, 3, 4, 5, 6, 7, 8, 9, 10, 11, 12, 13, 14, 15, 16, 17, 18, 19, 20, 21, 22, 23, 24, 25, 26, 27, 28, 29, 30, 31, 32, 33, 34, 35, 36, 37, 38, 39, 40, 41, 42, 43, 44, 45, 46, 47, 48, 49, 50, 51, 52, 53, 54, 55, 56, 57, 58, 59, or 60 engineered capsid proteins. In some embodiments, the engineered AAV capsid can contain 0-59 wild-type AAV capsid proteins. In some embodiments, the engineered AAV capsid can contain 0, 1, 2, 3, 4, 5, 6, 7, 8, 9, 10, 11, 12, 13, 14, 15, 16, 17, 18, 19, 20, 21, 22, 23, 24, 25, 26, 27, 28, 29, 30, 31, 32, 33, 34, 35, 36, 37, 38, 39, 40, 41, 42, 43, 44, 45, 46, 47, 48, 49, 50, 51, 52, 53, 54, 55, 56, 57, 58, or 59 wild-type AAV capsid proteins.

[0061] In some embodiments, the engineered viral capsid protein can have an n-mer amino acid motif, where n can be at least 3 amino acids. In some embodiments, n can be 3, 4, 5, 6, 7, 8, 9, 10, 11, 12, 13, 14, or 15 amino acids. In some embodiments, an engineered AAV capsid can have a 6-mer or 7-mer amino acid motif. In some embodiments, the n-mer amino acid motif can be inserted between two amino acids in the wild-type viral protein (VP) (or capsid protein). In some embodiments, the n-mer motif can be inserted between two amino acids in a variable amino acid region in a viral capsid protein.

[0062] In some embodiments, the n-mer motif can be inserted between two amino acids in a variable amino acid region in an AAV capsid protein. The core of each wild-type AAV viral protein contains an eight-stranded beta-barrel motif (betaB to betaI) and an alpha-helix (alphaA) that are conserved in autonomous parvovirus capsids (see e.g., DiMattia et al. 2012. J. Virol. 86 (12): 6947-6958). Structural variable regions (VRs) occur in the surface loops that connect the beta-strands, which cluster to produce local variations in the capsid surface. AAVs have 12 variable regions (also referred to as hypervariable regions) (see e.g., Weitzman and Linden. 2011. “Adeno-Associated Virus Biology.” In Snyder, R. O., Moullier, P. (eds.) Totowa, NJ: Humana Press). In some embodiments, one or more n-mer motifs can be inserted between two amino acids in one or more of the 12 variable regions in the wild-type AVV capsid proteins. In some embodiments, the one or more n-mer motifs can be each be inserted between two amino acids in VR-I, VR-II, VR-III, VR-IV, VR-V, VR-VI, VR-VII, VR-III, VR-IX, VR-X, VR-XI, VR-XII, or a combination thereof. In some embodiments, the n-mer can be inserted between two amino acids in the VR-III of a capsid protein. In some embodiments, the engineered capsid can have an n-mer inserted between any two contiguous amino acids between amino acids 262 and 269, between any two contiguous amino acids between amino acids 327 and 332, between any two contiguous amino acids between amino acids 382 and 386, between any two contiguous amino acids between amino acids 452 and 460, between any two contiguous amino acids between amino acids 488 and 505, between any two contiguous amino acids between amino acids 545 and 558, between any two contiguous amino acids between amino acids 581 and 593, between any two contiguous amino acids between amino acids 704 and 714 of an AAV9 viral protein. In some embodiments, the engineered capsid can have an n-mer inserted between amino acids 588 and 589 of an AAV9 viral protein. In some embodiments, the engineered capsid can have a 7-mer motif inserted between amino acids 588 and 589 of an AAV9 viral protein. In other embodiments, the motif inserted is a 10-mer motif, with replacement of amino acids 586-88 and an insertion before 589. SEQ ID NO. 1 is a reference AAV9 capsid sequence for at least referencing the insertion sites discussed above. It will be appreciated that n-mers can be inserted in analogous positions in AAV viral proteins of other serotypes. In some embodiments as previously discussed, the n-mer(s) can be inserted between any two contiguous amino acids within the AAV viral protein and in some embodiments the insertion is made in a variable region.

[0063] In some embodiments, the first 1, 2, 3, or 4 amino acids of an n-mer motif can replace 1, 2, 3, or 4 amino acids of a polypeptide into which it is inserted and preceding the insertion site. In some embodiments, the amino acids of the n-mer motif that replace 1 or more amino acids of the polypeptide into which the n-mer motif is inserted come before or immediately before an “RGD” in an n-mer motif. For example, in one or more of the 10-mer inserts, the first three amino acids shown can replace 1-3 amino acids into a polypeptide to which they may be inserted. Using an AAV as another non-limiting example, one or more of the n-mer motifs can be inserted into e.g., and AAV9 capsid prolylpeptide between amino acids 588 and 589 and the insert can replace amino acids 586, 587, and 588 such that the amino acid immediately preceding the n-mer motif after insertion is residue 585. It will be appreciated that this principle can apply in any other insertion context and is not necessarily limited to insertion between residues 588 and 589 of an AAV9 capsid or equivalent position in another AAV capsid. It will further be appreciated that in some embodiments, no amino acids in the polypeptide into which the n-mer motif is inserted are replaced by the n-mer motif.

[0064] In some embodiments, the AAV capsids or other viral capsids or compositions can be muscle-specific. In some embodiments, muscle-specificity of the engineered AAV or other viral capsid or other composition is conferred by a muscle specific n-mer motif incorporated in the engineered AAV or other viral capsid or other composition described herein. While not intending to be bound by theory, it is believed that the n-mer motif confers a 3D structure to or within a domain or region of the engineered AAV capsid or other viral capsid or other composition such that the interaction of the viral particle or other composition containing the engineered AAV capsid or other viral capsid or other composition described herein has increased or improved interactions (e.g., increased affinity) with a cell surface receptor and/or other molecule on the surface of a muscle cell. In some embodiments, the cell surface receptor is AAV receptor (AAVR). In some embodiments, the cell surface receptor is a muscle cell specific AAV receptor. In some embodiments, the cell surface receptor or other molecule is a cell surface receptor or other molecule selectively expressed on the surface of a muscle cell. In some embodiments, the cell surface receptor or molecule is an integrin or dimer thereof. In some embodiments, the cell surface receptor or molecule is an Vb6 integrin heterodimer.

[0065] In some embodiments, a muscle specific engineered viral particle or other composition described herein containing the muscle-specific capsid, n-mer motif, or muscle-specific targeting moiety described herein can have an increased uptake, delivery rate, transduction rate, efficiency, amount, or a combination thereof in a muscle cell as compared to other cells types and/or other virus particles (including but not limited to AAVs) and other compositions that do not contain the muscle-specific n-mer motif of the present invention.

[0066] First- and second-generation muscle specific AAV capsids were developed using a muscle specific promoter and the resulting capsid libraries were screened in mice and non-human primates as described elsewhere herein and/or in e.g., U.S. Provisional Application Ser. Nos. 62/899,453, 62/916,207, 63/018,454, 63/242,008, and No. 63/345,14.

### EXPERIMENTAL DETAILS

[0067] Co-evolution of liver de-targeting and muscle targeting features resulted in development of MyoAAV-LD capsids in NHPs, resulting in “6th generation” capsids terms MyoAAV-LD 6.

### First Generation Muscle Gene Therapies are not Optimized for Efficacy and Safety.

[0068] Naturally occurring AAV capsids do not transduce muscle effectively.

[0069] Capsids used in first-generation gene therapies (e.g. AAV8, AAV9, AAVrh74) are mainly sequestered in the liver after systemic administration, requiring very high doses to be effective in muscle disease.

[0070] High doses cause toxicity. Serious side effects have occurred with high dose gene therapies, including liver injury, and an acute blood disorder called thrombotic microangiopathy that can cause kidney injury.

[0071] Cargoes lack effective and selective regulatory elements. First generation AAV muscle gene therapies do not use highly optimized skeletal muscle and cardiac regulatory elements, potential for off-target toxicity.

[0072] More potent and tissue selective capsids are required to treat muscle and heart disease safely and effectively.

### Novel Capsids

[0073] A novel platform was utilized comprising a capsid and gene expression regulation technologies to address critical challenges in muscle gene therapies.

[0074] FIG. 1 is a schematic of the novel platform of the invention. Machine learning driven cardiac and skeletal muscle specific regulatory elements (enhancer-promoter) were developed. Tissue specific miRNA mediated transgene silencing was developed. Machine learning driven capsid directed evolution was utilized to engineer muscle and heart tropic, liver de-targeted capsids.

### Capsid Development

[0075] FIG. 2 is a schematic of the novel capsid platform of the invention. Directed evolution of AAV capsids leveraged in vivo expression of transgene RNA. A diverse first-round virus library was designed based on the capsid 3D structure. Machine learning-based design was used for a second-round capsid library. Stringent mRNA-based selection was conduct of capsid variants. Potent capsid variants in any specific or cell type of interest (non-human primates, mice) was conducted.

[0076] The platform identified RGD-containing MyoAAV class of skeletal muscle and cardiotropic capsids in mice and non-human primates.

[0077] FIG. 3A shows images of fluorescence in tissues following administration of capsids of the invention.

[0078] FIG. 3B shows graphs of transgene mRNA in tissues following administration of capsids of the invention.

[0079] 5E+13 vg/kg of MyoAAVIA- or AAV9-EGFP was administered to tissues harvested 14 days post IV administration from adult C57BL/6 mice. The platform was successful in identifying a class of skeletal muscle and cardiotropic capsids MyoAAV class capsids showed unprecedented targeting to skeletal muscle and heart.

[0080] FIG. 4A-B show graphs of relative luminescence in mouse and human primary myotubules following administration of capsids of the invention.

[0081] FIG. 5A-5B shows graphs of transduction percentage in mouse and human primary myotubules following administration of capsids of the invention.

[0082] Muscle tropism of MyoAAV was conserved across species and dependent on aV-containing integrin heterodimers. The conserved mechanism of transduction provides confidence in translating potency to humans.

### Generation of MyoAAV Capsids

[0083] MyoAAV capsid generation led to a more potent muscle-tropic gene therapy candidate for the treatment of XLMTM (KT430).

[0084] FIG. 6 is a graph of probability of survival following capsid and transgene administration in Mtm1 knockout (KO) mice. KT430 reversed XLMTM disease phenotype at very low doses (<3E12 vg/mg) in Mtm1 KO mice.

[0085] FIG. 7 is an image of MTM1 levels in non-human primate skeletal muscle following capsid and transgene administration. KT430 produced supra-physiological MTM1 levels in NHP skeletal muscle at 1E13 vg/kg.

### 6^{th} Generation Capsids

[0086] Additional modifications to AAV capsids enabled directed evolution of liver-de-targeted and muscle-tropic capsid variants.

[0087] FIG. 8 shows images of fluorescence in tissues following administration of capsids of the invention.

[0088] Novel capsids (termed “6^{th} generation”) Myo-AAV-LD capsids were generated. Barcoded transgenes (CBh-hFXN) were packaged into different novel capsid variants. The pool of capsid variants were injected into 4 Cyno Macaques and expression of transgene from each capsid variant was quantified by sequencing the barcodes 4 weeks after injection.

[0089] FIG. 9A-B show mRNA transgene expression levels in NHP skeletal muscle following administration of capsids of the invention.

[0090] FIG. 10A-B show mRNA transgene expression levels in NHP cardiac muscle following administration of capsids of the invention.

[0091] FIG. 11A-B show mRNA transgene expression levels in NHP liver following administration of capsids of the invention.

[0092] FIG. 12A-B show mRNA transgene expression levels in NHP dorsal root ganglia (DRG) following administration of capsids of the invention.

[0093] Capsids of the invention outperform in transducing NHL skeletal muscle versus naturally occurring and previously engineered capsids.

[0094] Capsids of the invention outperform in transducing NHL cardiac muscle versus naturally occurring and previously engineered capsids.

[0095] Capsids of the invention outperform were de-targeted from the liver at the DNA level in NHPs compared to naturally occurring capsids.

[0096] Capsids of the invention outperform were de-targeted from DRG in NHPs compared to naturally occurring capsids.

[0097] The top skeletal muscle tropic liver de-targeted MyoAAV-LD capsid, MyoAAV-LD 6.1, transduced NHP skeletal muscles ˜20 times more effectively and was ˜10 times de-targeted from the liver compared to AAV9.

[0098] The top cardiotropic liver de-targeted MyoAAV-LD capsid, MyoAAV-LD 6.9, transduced NHP cardiac muscle ˜11 times more effectively and was ˜6 times de-targeted from the liver compared to AAV9.

### DISCUSSION

[0099] Coevolution of liver de-targeting and muscle targeting features resulted in the development of MyoAAV-LD capsids in NHPs. The top skeletal muscle tropic liver de-targeted MyoAAV-LD capsid, MyoAAV-LD 6.1, transduced NHP skeletal muscles ˜20 times more effectively and was ˜10 times de-targeted from the liver compared to AAV9.

[0100] The top cardiotropic liver de-targeted MyoAAV-LD capsid, MyoAAV-LD 6.9, transduced NHP cardiac muscle ˜11 times more effectively and was ˜6 times de-targeted from the liver compared to AAV9.

### INCORPORATION BY REFERENCE

[0101] References and citations to other documents, such as patents, patent applications, patent publications, journals, books, papers, web contents, have been made throughout this disclosure. All such documents are hereby incorporated herein by reference in their entirety for all purposes.

### EQUIVALENTS

[0102] Various modifications of the invention and many further embodiments thereof, in addition to those shown and described herein, will become apparent to those skilled in the art from the full contents of this document, including references to the scientific and patent literature cited herein. The subject matter herein contains important information, exemplification and guidance that can be adapted to the practice of this invention in its various embodiments and equivalents thereof.

1.-23. (canceled)

24. An engineered adeno-associated virus (AAV) serotype 9 (AAV9) capsid protein comprising the amino acid sequence X₁NX₂X₃X₄RGDRX₅X₆L, wherein, relative to a wild-type AAV9 capsid protein,
X₁ is located at amino acid 451 and is any amino acid;
X₂ is located at amino acid 453 and is any amino acid;
X₃ is located at amino acid 454 and is any amino acid;
X₄ is located at amino acid 455 and is any amino acid; and
RGDRX₅X₆L is inserted after amino acid 455 and X₅-X₆ are any amino acid.

25. The engineered AAV9 capsid protein of claim 24, wherein:
X₁ is A, I, F, G, H, L, M, Q, S, T, or V;
X₂ is A, G, S, T, or Y;
X₃ is S, N, G, or P;
X₄ is A, G, H, I, M, S, T, or V;
X₅ is A, G, or Q; and
X₆ is A, I, L, M, N, S, or Y.

26. The engineered AAV9 capsid protein of claim 24, wherein:
X₁ is A, I, L, M, S, or V;
X₂ is A, G, S, T, or Y;
X₃ is S, N, G, or P;
X₄ is A, G, M, S, T, or V;
X₅ is A, G, or Q; and
X₆ is A, S, or Y.

27. The engineered AAV9 capsid protein of claim 24, wherein X₁NX₂X₃X₄ comprises an amino acid sequence of any one of one SEQ ID NOs: 801-1599, and RGDRX₅X₆L comprises an amino acid sequence of any one of SEQ ID NOs: 1600-2398.

28. The engineered AAV9 capsid protein of claim 24, wherein X₁NX₂X₃X₄ and RGDRX₅X₆L each correspond to the sequence of the 5 amino acid substitution and the 7 amino acid insert from a single row in a single column of Table 1b.

29. The engineered AAV9 capsid protein of claim 24, wherein the engineered AAV9 capsid protein further comprises a deletion of amino acid G267 relative to a wild-type AAV9.

30. The engineered AAV9 capsid protein of claim 24, wherein the engineered AAV9 capsid protein comprises the amino acid sequence X₁NX₂SX₄RGDRQX₆L, and wherein, relative to a wild-type AAV9 capsid protein,
X₁ is L, S, or V substituted for I at amino acid 451;
X₂ is G or is A or Y substituted for G at amino acid 451;
X₄ is T, I, M, or V substituted for G at amino acid 455; and
RGDRQX₆L is inserted after amino acid 455 and X₆ is Y, A, L, or S.

31. The engineered AAV9 capsid protein of claim 30, wherein the engineered AAV9 capsid protein further comprises a deletion of amino acid G267 relative to a wild-type AAV9.

32. The engineered AAV9 capsid protein of claim 30, wherein the engineered AAV9 capsid protein comprises the amino acid sequence LNASIRGDRQLL (SEQ ID NO: 191), wherein, relative to a wild-type AAV9 capsid protein, L is substituted for I at amino acid 451, A is substituted for G at amino acid 453, I is substituted for G at amino acid 455, and RGDRQLL (SEQ ID NO: 1789) is inserted after amino acid 455 in reference to a wild-type AAV9 capsid protein.

33. The engineered AAV9 capsid protein of claim 32, wherein the engineered AAV9 capsid protein further comprises a deletion of amino acid G267 relative to a wild-type AAV9.

34. The engineered AAV9 capsid protein of claim 30, wherein the engineered AAV9 capsid protein comprises the amino acid sequence LNASMRGDRQAL (SEQ ID NO: 198), wherein, relative to a wild-type AAV9 capsid protein, L is substituted for I at amino acid 451, A is substituted for G at amino acid 453, M is substituted for G at amino acid 455, and RGDRQAL (SEQ ID NO: 1977) is inserted after amino acid 455 in reference to a wild-type AAV9 capsid protein.

35. The engineered AAV9 capsid protein of claim 34, wherein the engineered AAV9 capsid protein further comprises a deletion of amino acid G267 relative to a wild-type AAV9.

36. The engineered AAV9 capsid protein of claim 30, wherein the engineered AAV9 capsid protein comprises the amino acid sequence LNASMRGDRQSL (SEQ ID NO: 199), wherein, relative to a wild-type AAV9 capsid protein, L is substituted for I at amino acid 451, A is substituted for G at amino acid 453, M is substituted for G at amino acid 455, and RGDRQSL (SEQ ID NO: 1797) is inserted after amino acid 455 in reference to a wild-type AAV9 capsid protein.

37. The engineered AAV9 capsid protein of claim 36, wherein the engineered AAV9 capsid protein further comprises a deletion of amino acid G267 relative to a wild-type AAV9.

38. The engineered AAV9 capsid protein of claim 30, wherein the engineered AAV9 capsid protein comprises the amino acid sequence LNASTRGDRQYL (SEQ ID NO: 215), wherein, relative to a wild-type AAV9 capsid protein, L is substituted for I at amino acid 451, A is substituted for G at amino acid 453, T is substituted for G at amino acid 455, and RGDRQYL (SEQ ID NO: 1813) is inserted after amino acid 455 in reference to a wild-type AAV9 capsid protein.

39. The engineered AAV9 capsid protein of claim 38, wherein the engineered AAV9 capsid protein further comprises a deletion of amino acid G267 relative to a wild-type AAV9.

40. The engineered AAV9 capsid protein of claim 30, wherein the engineered AAV9 capsid protein comprises the amino acid sequence LNGSTRGDRQYL (SEQ ID NO: 256), wherein, relative to a wild-type AAV9 capsid protein, L is substituted for I at amino acid 451, T is substituted for G at amino acid 455, and RGDRQYL (SEQ ID NO: 1813) is inserted after amino acid 455 in reference to a wild-type AAV9 capsid protein.

41. The engineered AAV9 capsid protein of claim 40, wherein the engineered AAV9 capsid protein further comprises a deletion of amino acid G267 relative to a wild-type AAV9.

42. The engineered AAV9 capsid protein of claim 30, wherein the engineered AAV9 capsid protein comprises the amino acid sequence LNYSTRGDRQAL (SEQ ID NO: 379), wherein, relative to a wild-type AAV9 capsid protein, L is substituted for I at amino acid 451, Y is substituted for G at amino acid 453, T is substituted for G at amino acid 455, and RGDRQAL (SEQ ID NO: 1977) is inserted after amino acid 455 in reference to a wild-type AAV9 capsid protein.

43. The engineered AAV9 capsid protein of claim 42, wherein the engineered AAV9 capsid protein further comprises a deletion of amino acid G267 relative to a wild-type AAV9.

44. The engineered AAV9 capsid protein of claim 30, wherein the engineered AAV9 capsid protein comprises the amino acid sequence SNASTRGDRQYL (SEQ ID NO: 544), wherein, relative to a wild-type AAV9 capsid protein, S is substituted for I at amino acid 451, A is substituted for G at amino acid 453, T is substituted for G at amino acid 455, and RGDRQYL (SEQ ID NO: 1813) is inserted after amino acid 455 in reference to a wild-type AAV9 capsid protein.

45. The engineered AAV9 capsid protein of claim 44, wherein the engineered AAV9 capsid protein further comprises a deletion of amino acid G267 relative to a wild-type AAV9.

46. The engineered AAV9 capsid protein of claim 30, wherein the engineered AAV9 capsid protein comprises the amino acid sequence SNASVRGDRQAL (SEQ ID NO: 550), wherein, relative to a wild-type AAV9 capsid protein, S is substituted for I at amino acid 451, A is substituted for G at amino acid 453, Vis substituted for G at amino acid 455, and RGDRQAL (SEQ ID NO: 1977) is inserted after amino acid 455 in reference to a wild-type AAV9 capsid protein.

47. The engineered AAV9 capsid protein of claim 46, wherein the engineered AAV9 capsid protein further comprises a deletion of amino acid G267 relative to a wild-type AAV9.

48. The engineered AAV9 capsid protein of claim 30, wherein the engineered AAV9 capsid protein comprises the amino acid sequence VNGSTRGDRQYL (SEQ ID NO: 748), wherein, relative to a wild-type AAV9 capsid protein, Vis substituted for I at amino acid 451, T is substituted for G at amino acid 455, and RGDRQYL (SEQ ID NO: 1813) is inserted after amino acid 455 in reference to a wild-type AAV9 capsid protein.

49. The engineered AAV9 capsid protein of claim 48, wherein the engineered AAV9 capsid protein further comprises a deletion of amino acid G267 relative to a wild-type AAV9.

50. An AAV vector comprising the engineered AAV9 capsid protein of claim 24 and a transgene.

51. The AAV vector of claim 49, wherein the AAV vector exhibits increased muscle tropism as compared to a wild-type AAV vector.

52. The AAV vector of claim 49, wherein the AAV vector exhibits reduced liver tropism as compared to a wild-type AAV vector.

53. A method of treating a genetic disease comprising administering the AAV vector of claim 49.

The application's sequence listing, which the Patent Office published only in electronic form, follows.

SEQUENCE LISTING (2398 sequences)

SEQ ID NO: 1 - protein, 736 aa, synthetic construct
MAADGYLPDWLEDNLSEGIREWWALKPGAPQPKANQQHQDNARGLVLPGYKYLGPGNGLDKGEPVNAADAAALEHDKAYDQQLKAGDNPYLKYNHADAEFQERLKEDTSFGGNLGRAVFQAKKRLLEPLGLVEEAAKTAPGKKRPVEQSPQEPDSSAGIGKSGAQPAKKRLNFGQTGDTESVPDPQPIGEPPAAPSGVGSLTMASGGGAPVADNNEGADGVGSSSGNWHCDSQWLGDRVITTSTRTWALPTYNNHLYKQISNSTSGGSSNDNAYFGYSTPWGYFDFNRFHCHFSPRDWQRLINNNWGFRPKRLNFKLFNIQVKEVTDNNGVKTIANNLTSTVQVFTDSDYQLPYVLGSAHEGCLPPFPADVFMIPQYGYLTLNDGSQAVGRSSFYCLEYFPSQMLRTGNNFQFSYEFENVPFHSSYAHSQSLDRLMNPLIDQYLYYLSKTINGSGQNQQTLKFSVAGPSNMAVQGRNYIPGPSYRQQRVSTTVTQNNNSEFAWPGASSWALNGRNSLMNPGPAMASHKEGEDRFFPLSGSLIFGKQGTGRDNVDADKVMITNEEEIKTTNPVATESYGQVATNHQSAQAQAQTGWVQNQGILPGMVWQDRDVYLQGPIWAKIPHTDGNFHPSPLMGGFGMKHPPPQILIKNTPVPADPPTAFNKDKLNSFITQYSTGQVSVEIEWELQKENSKRWNPEIQYTSNYYKSNNVEFAVNTEGVYSEPRPIGTRYLTRNL

SEQ ID NO: 2 - protein, 12 aa, synthetic construct
ANASARGDRAAL

SEQ ID NO: 3 - protein, 12 aa, synthetic construct
ANASARGDRGSL

SEQ ID NO: 4 - protein, 12 aa, synthetic construct
ANASARGDRGYL

SEQ ID NO: 5 - protein, 12 aa, synthetic construct
ANASARGDRQAL

SEQ ID NO: 6 - protein, 12 aa, synthetic construct
ANASARGDRQSL

SEQ ID NO: 7 - protein, 12 aa, synthetic construct
ANASARGDRQYL

SEQ ID NO: 8 - protein, 12 aa, synthetic construct
ANASGRGDRAAL

SEQ ID NO: 9 - protein, 12 aa, synthetic construct
ANASGRGDRASL

SEQ ID NO: 10 - protein, 12 aa, synthetic construct
ANASGRGDRAYL

SEQ ID NO: 11 - protein, 12 aa, synthetic construct
ANASGRGDRGAL

SEQ ID NO: 12 - protein, 12 aa, synthetic construct
ANASGRGDRGSL

SEQ ID NO: 13 - protein, 12 aa, synthetic construct
ANASGRGDRGYL

SEQ ID NO: 14 - protein, 12 aa, synthetic construct
ANASGRGDRQAL

SEQ ID NO: 15 - protein, 12 aa, synthetic construct
ANASGRGDRQSL

SEQ ID NO: 16 - protein, 12 aa, synthetic construct
ANASGRGDRQYL

SEQ ID NO: 17 - protein, 12 aa, synthetic construct
ANASMRGDRAAL

SEQ ID NO: 18 - protein, 12 aa, synthetic construct
ANASMRGDRASL

SEQ ID NO: 19 - protein, 12 aa, synthetic construct
ANASMRGDRAYL

SEQ ID NO: 20 - protein, 12 aa, synthetic construct
ANASMRGDRQAL

SEQ ID NO: 21 - protein, 12 aa, synthetic construct
ANASMRGDRQSL

SEQ ID NO: 22 - protein, 12 aa, synthetic construct
ANASSRGDRGSL

SEQ ID NO: 23 - protein, 12 aa, synthetic construct
ANASSRGDRGYL

SEQ ID NO: 24 - protein, 12 aa, synthetic construct
ANASSRGDRQAL

SEQ ID NO: 25 - protein, 12 aa, synthetic construct
ANASSRGDRQSL

SEQ ID NO: 26 - protein, 12 aa, synthetic construct
ANASSRGDRQYL

SEQ ID NO: 27 - protein, 12 aa, synthetic construct
ANASTRGDRASL

SEQ ID NO: 28 - protein, 12 aa, synthetic construct
ANASTRGDRAYL

SEQ ID NO: 29 - protein, 12 aa, synthetic construct
ANASTRGDRGAL

SEQ ID NO: 30 - protein, 12 aa, synthetic construct
ANASTRGDRGSL

SEQ ID NO: 31 - protein, 12 aa, synthetic construct
ANASTRGDRGYL

SEQ ID NO: 32 - protein, 12 aa, synthetic construct
ANASTRGDRQAL

SEQ ID NO: 33 - protein, 12 aa, synthetic construct
ANASTRGDRQSL

SEQ ID NO: 34 - protein, 12 aa, synthetic construct
ANASTRGDRQYL

SEQ ID NO: 35 - protein, 12 aa, synthetic construct
ANASVRGDRASL

SEQ ID NO: 36 - protein, 12 aa, synthetic construct
ANASVRGDRGYL

SEQ ID NO: 37 - protein, 12 aa, synthetic construct
ANASVRGDRQAL

SEQ ID NO: 38 - protein, 12 aa, synthetic construct
ANASVRGDRQSL

SEQ ID NO: 39 - protein, 12 aa, synthetic construct
ANASVRGDRQYL

SEQ ID NO: 40 - protein, 12 aa, synthetic construct
ANGNFRGDRQNL

SEQ ID NO: 41 - protein, 12 aa, synthetic construct
ANGNVRGDRGML

SEQ ID NO: 42 - protein, 12 aa, synthetic construct
ANGSARGDRAYL

SEQ ID NO: 43 - protein, 12 aa, synthetic construct
ANGSARGDRGSL

SEQ ID NO: 44 - protein, 12 aa, synthetic construct
ANGSARGDRGYL

SEQ ID NO: 45 - protein, 12 aa, synthetic construct
ANGSARGDRQAL

SEQ ID NO: 46 - protein, 12 aa, synthetic construct
ANGSARGDRQYL

SEQ ID NO: 47 - protein, 12 aa, synthetic construct
ANGSGRGDRAAL

SEQ ID NO: 48 - protein, 12 aa, synthetic construct
ANGSGRGDRAYL

SEQ ID NO: 49 - protein, 12 aa, synthetic construct
ANGSGRGDRGAL

SEQ ID NO: 50 - protein, 12 aa, synthetic construct
ANGSGRGDRGSL

SEQ ID NO: 51 - protein, 12 aa, synthetic construct
ANGSGRGDRGYL

SEQ ID NO: 52 - protein, 12 aa, synthetic construct
ANGSGRGDRQAL

SEQ ID NO: 53 - protein, 12 aa, synthetic construct
ANGSGRGDRQSL

SEQ ID NO: 54 - protein, 12 aa, synthetic construct
ANGSGRGDRQYL

SEQ ID NO: 55 - protein, 12 aa, synthetic construct
ANGSMRGDRGYL

SEQ ID NO: 56 - protein, 12 aa, synthetic construct
ANGSMRGDRQAL

SEQ ID NO: 57 - protein, 12 aa, synthetic construct
ANGSMRGDRQSL

SEQ ID NO: 58 - protein, 12 aa, synthetic construct
ANGSMRGDRQYL

SEQ ID NO: 59 - protein, 12 aa, synthetic construct
ANGSSRGDRAYL

SEQ ID NO: 60 - protein, 12 aa, synthetic construct
ANGSSRGDRGSL

SEQ ID NO: 61 - protein, 12 aa, synthetic construct
ANGSSRGDRGYL

SEQ ID NO: 62 - protein, 12 aa, synthetic construct
ANGSSRGDRQAL

SEQ ID NO: 63 - protein, 12 aa, synthetic construct
ANGSSRGDRQSL

SEQ ID NO: 64 - protein, 12 aa, synthetic construct
ANGSSRGDRQYL

SEQ ID NO: 65 - protein, 12 aa, synthetic construct
ANGSTRGDRAAL

SEQ ID NO: 66 - protein, 12 aa, synthetic construct
ANGSTRGDRAYL

SEQ ID NO: 67 - protein, 12 aa, synthetic construct
ANGSTRGDRGAL

SEQ ID NO: 68 - protein, 12 aa, synthetic construct
ANGSTRGDRGYL

SEQ ID NO: 69 - protein, 12 aa, synthetic construct
ANGSTRGDRQAL

SEQ ID NO: 70 - protein, 12 aa, synthetic construct
ANGSTRGDRQSL

SEQ ID NO: 71 - protein, 12 aa, synthetic construct
ANGSTRGDRQYL

SEQ ID NO: 72 - protein, 12 aa, synthetic construct
ANGSVRGDRAYL

SEQ ID NO: 73 - protein, 12 aa, synthetic construct
ANGSVRGDRGYL

SEQ ID NO: 74 - protein, 12 aa, synthetic construct
ANGSVRGDRQAL

SEQ ID NO: 75 - protein, 12 aa, synthetic construct
ANGSVRGDRQYL

SEQ ID NO: 76 - protein, 12 aa, synthetic construct
ANSGMRGDRGAL

SEQ ID NO: 77 - protein, 12 aa, synthetic construct
ANSSARGDRGAL

SEQ ID NO: 78 - protein, 12 aa, synthetic construct
ANSSARGDRGSL

SEQ ID NO: 79 - protein, 12 aa, synthetic construct
ANSSARGDRGYL

SEQ ID NO: 80 - protein, 12 aa, synthetic construct
ANSSARGDRQAL

SEQ ID NO: 81 - protein, 12 aa, synthetic construct
ANSSARGDRQSL

SEQ ID NO: 82 - protein, 12 aa, synthetic construct
ANSSARGDRQYL

SEQ ID NO: 83 - protein, 12 aa, synthetic construct
ANSSGRGDRAAL

SEQ ID NO: 84 - protein, 12 aa, synthetic construct
ANSSGRGDRASL

SEQ ID NO: 85 - protein, 12 aa, synthetic construct
ANSSGRGDRAYL

SEQ ID NO: 86 - protein, 12 aa, synthetic construct
ANSSGRGDRGAL

SEQ ID NO: 87 - protein, 12 aa, synthetic construct
ANSSGRGDRGSL

SEQ ID NO: 88 - protein, 12 aa, synthetic construct
ANSSGRGDRGYL

SEQ ID NO: 89 - protein, 12 aa, synthetic construct
ANSSGRGDRQAL

SEQ ID NO: 90 - protein, 12 aa, synthetic construct
ANSSGRGDRQSL

SEQ ID NO: 91 - protein, 12 aa, synthetic construct
ANSSGRGDRQYL

SEQ ID NO: 92 - protein, 12 aa, synthetic construct
ANSSMRGDRAYL

SEQ ID NO: 93 - protein, 12 aa, synthetic construct
ANSSMRGDRQAL

SEQ ID NO: 94 - protein, 12 aa, synthetic construct
ANSSMRGDRQSL

SEQ ID NO: 95 - protein, 12 aa, synthetic construct
ANSSMRGDRQYL

SEQ ID NO: 96 - protein, 12 aa, synthetic construct
ANSSSRGDRGSL

SEQ ID NO: 97 - protein, 12 aa, synthetic construct
ANSSSRGDRGYL

SEQ ID NO: 98 - protein, 12 aa, synthetic construct
ANSSSRGDRQAL

SEQ ID NO: 99 - protein, 12 aa, synthetic construct
ANSSSRGDRQSL

SEQ ID NO: 100 - protein, 12 aa, synthetic construct
ANSSSRGDRQYL

SEQ ID NO: 101 - protein, 12 aa, synthetic construct
ANSSTRGDRAAL

SEQ ID NO: 102 - protein, 12 aa, synthetic construct
ANSSTRGDRGSL

SEQ ID NO: 103 - protein, 12 aa, synthetic construct
ANSSTRGDRQAL

SEQ ID NO: 104 - protein, 12 aa, synthetic construct
ANSSTRGDRQSL

SEQ ID NO: 105 - protein, 12 aa, synthetic construct
ANSSTRGDRQYL

SEQ ID NO: 106 - protein, 12 aa, synthetic construct
ANSSVRGDRAYL

SEQ ID NO: 107 - protein, 12 aa, synthetic construct
ANSSVRGDRGYL

SEQ ID NO: 108 - protein, 12 aa, synthetic construct
ANSSVRGDRQAL

SEQ ID NO: 109 - protein, 12 aa, synthetic construct
ANSSVRGDRQSL

SEQ ID NO: 110 - protein, 12 aa, synthetic construct
ANSSVRGDRQYL

SEQ ID NO: 111 - protein, 12 aa, synthetic construct
ANTSARGDRAYL

SEQ ID NO: 112 - protein, 12 aa, synthetic construct
ANTSARGDRGAL

SEQ ID NO: 113 - protein, 12 aa, synthetic construct
ANTSARGDRGSL

SEQ ID NO: 114 - protein, 12 aa, synthetic construct
ANTSARGDRGYL

SEQ ID NO: 115 - protein, 12 aa, synthetic construct
ANTSARGDRQAL

SEQ ID NO: 116 - protein, 12 aa, synthetic construct
ANTSARGDRQYL

SEQ ID NO: 117 - protein, 12 aa, synthetic construct
ANTSGRGDRASL

SEQ ID NO: 118 - protein, 12 aa, synthetic construct
ANTSGRGDRGAL

SEQ ID NO: 119 - protein, 12 aa, synthetic construct
ANTSGRGDRGSL

SEQ ID NO: 120 - protein, 12 aa, synthetic construct
ANTSGRGDRGYL

SEQ ID NO: 121 - protein, 12 aa, synthetic construct
ANTSGRGDRQAL

SEQ ID NO: 122 - protein, 12 aa, synthetic construct
ANTSGRGDRQSL

SEQ ID NO: 123 - protein, 12 aa, synthetic construct
ANTSGRGDRQYL

SEQ ID NO: 124 - protein, 12 aa, synthetic construct
ANTSMRGDRAYL

SEQ ID NO: 125 - protein, 12 aa, synthetic construct
ANTSMRGDRQAL

SEQ ID NO: 126 - protein, 12 aa, synthetic construct
ANTSMRGDRQSL

SEQ ID NO: 127 - protein, 12 aa, synthetic construct
ANTSMRGDRQYL

SEQ ID NO: 128 - protein, 12 aa, synthetic construct
ANTSSRGDRGSL

SEQ ID NO: 129 - protein, 12 aa, synthetic construct
ANTSSRGDRQAL

SEQ ID NO: 130 - protein, 12 aa, synthetic construct
ANTSSRGDRQYL

SEQ ID NO: 131 - protein, 12 aa, synthetic construct
ANTSTRGDRAAL

SEQ ID NO: 132 - protein, 12 aa, synthetic construct
ANTSTRGDRQAL

SEQ ID NO: 133 - protein, 12 aa, synthetic construct
ANTSTRGDRQSL

SEQ ID NO: 134 - protein, 12 aa, synthetic construct
ANTSTRGDRQYL

SEQ ID NO: 135 - protein, 12 aa, synthetic construct
ANTSVRGDRAYL

SEQ ID NO: 136 - protein, 12 aa, synthetic construct
ANTSVRGDRGSL

SEQ ID NO: 137 - protein, 12 aa, synthetic construct
ANTSVRGDRQAL

SEQ ID NO: 138 - protein, 12 aa, synthetic construct
ANTSVRGDRQSL

SEQ ID NO: 139 - protein, 12 aa, synthetic construct
ANTSVRGDRQYL

SEQ ID NO: 140 - protein, 12 aa, synthetic construct
ANYPHRGDRGAL

SEQ ID NO: 141 - protein, 12 aa, synthetic construct
ANYSARGDRAAL

SEQ ID NO: 142 - protein, 12 aa, synthetic construct
ANYSARGDRASL

SEQ ID NO: 143 - protein, 12 aa, synthetic construct
ANYSARGDRGAL

SEQ ID NO: 144 - protein, 12 aa, synthetic construct
ANYSARGDRGSL

SEQ ID NO: 145 - protein, 12 aa, synthetic construct
ANYSARGDRQAL

SEQ ID NO: 146 - protein, 12 aa, synthetic construct
ANYSARGDRQSL

SEQ ID NO: 147 - protein, 12 aa, synthetic construct
ANYSGRGDRAAL

SEQ ID NO: 148 - protein, 12 aa, synthetic construct
ANYSGRGDRASL

SEQ ID NO: 149 - protein, 12 aa, synthetic construct
ANYSGRGDRGAL

SEQ ID NO: 150 - protein, 12 aa, synthetic construct
ANYSGRGDRGSL

SEQ ID NO: 151 - protein, 12 aa, synthetic construct
ANYSGRGDRQAL

SEQ ID NO: 152 - protein, 12 aa, synthetic construct
ANYSGRGDRQSL

SEQ ID NO: 153 - protein, 12 aa, synthetic construct
ANYSGRGDRQYL

SEQ ID NO: 154 - protein, 12 aa, synthetic construct
ANYSMRGDRAAL

SEQ ID NO: 155 - protein, 12 aa, synthetic construct
ANYSMRGDRASL

SEQ ID NO: 156 - protein, 12 aa, synthetic construct
ANYSMRGDRAYL

SEQ ID NO: 157 - protein, 12 aa, synthetic construct
ANYSMRGDRQAL

SEQ ID NO: 158 - protein, 12 aa, synthetic construct
ANYSMRGDRQSL

SEQ ID NO: 159 - protein, 12 aa, synthetic construct
ANYSSRGDRGAL

SEQ ID NO: 160 - protein, 12 aa, synthetic construct
ANYSSRGDRGSL

SEQ ID NO: 161 - protein, 12 aa, synthetic construct
ANYSSRGDRQAL

SEQ ID NO: 162 - protein, 12 aa, synthetic construct
ANYSSRGDRQSL

SEQ ID NO: 163 - protein, 12 aa, synthetic construct
ANYSSRGDRQYL

SEQ ID NO: 164 - protein, 12 aa, synthetic construct
ANYSTRGDRQAL

SEQ ID NO: 165 - protein, 12 aa, synthetic construct
ANYSTRGDRQSL

SEQ ID NO: 166 - protein, 12 aa, synthetic construct
ANYSTRGDRQYL

SEQ ID NO: 167 - protein, 12 aa, synthetic construct
ANYSVRGDRQAL

SEQ ID NO: 168 - protein, 12 aa, synthetic construct
ANYSVRGDRQSL

SEQ ID NO: 169 - protein, 12 aa, synthetic construct
ANYSVRGDRQYL

SEQ ID NO: 170 - protein, 12 aa, synthetic construct
FNSGMRGDRGAL

SEQ ID NO: 171 - protein, 12 aa, synthetic construct
GNSGMRGDRGAL

SEQ ID NO: 172 - protein, 12 aa, synthetic construct
HNSGMRGDRGAL

SEQ ID NO: 173 - protein, 12 aa, synthetic construct
LNASARGDRAAL

SEQ ID NO: 174 - protein, 12 aa, synthetic construct
LNASARGDRASL

SEQ ID NO: 175 - protein, 12 aa, synthetic construct
LNASARGDRAYL

SEQ ID NO: 176 - protein, 12 aa, synthetic construct
LNASARGDRGAL

SEQ ID NO: 177 - protein, 12 aa, synthetic construct
LNASARGDRGSL

SEQ ID NO: 178 - protein, 12 aa, synthetic construct
LNASARGDRGYL

SEQ ID NO: 179 - protein, 12 aa, synthetic construct
LNASARGDRQAL

SEQ ID NO: 180 - protein, 12 aa, synthetic construct
LNASARGDRQSL

SEQ ID NO: 181 - protein, 12 aa, synthetic construct
LNASARGDRQYL

SEQ ID NO: 182 - protein, 12 aa, synthetic construct
LNASGRGDRAAL

SEQ ID NO: 183 - protein, 12 aa, synthetic construct
LNASGRGDRASL

SEQ ID NO: 184 - protein, 12 aa, synthetic construct
LNASGRGDRAYL

SEQ ID NO: 185 - protein, 12 aa, synthetic construct
LNASGRGDRGAL

SEQ ID NO: 186 - protein, 12 aa, synthetic construct
LNASGRGDRGSL

SEQ ID NO: 187 - protein, 12 aa, synthetic construct
LNASGRGDRGYL

SEQ ID NO: 188 - protein, 12 aa, synthetic construct
LNASGRGDRQAL

SEQ ID NO: 189 - protein, 12 aa, synthetic construct
LNASGRGDRQSL

SEQ ID NO: 190 - protein, 12 aa, synthetic construct
LNASGRGDRQYL

SEQ ID NO: 191 - protein, 12 aa, synthetic construct
LNASIRGDRQLL

SEQ ID NO: 192 - protein, 12 aa, synthetic construct
LNASMRGDRAAL

SEQ ID NO: 193 - protein, 12 aa, synthetic construct
LNASMRGDRASL

SEQ ID NO: 194 - protein, 12 aa, synthetic construct
LNASMRGDRAYL

SEQ ID NO: 195 - protein, 12 aa, synthetic construct
LNASMRGDRGAL

SEQ ID NO: 196 - protein, 12 aa, synthetic construct
LNASMRGDRGSL

SEQ ID NO: 197 - protein, 12 aa, synthetic construct
LNASMRGDRGYL

SEQ ID NO: 198 - protein, 12 aa, synthetic construct
LNASMRGDRQAL

SEQ ID NO: 199 - protein, 12 aa, synthetic construct
LNASMRGDRQSL

SEQ ID NO: 200 - protein, 12 aa, synthetic construct
LNASMRGDRQYL

SEQ ID NO: 201 - protein, 12 aa, synthetic construct
LNASSRGDRAAL

SEQ ID NO: 202 - protein, 12 aa, synthetic construct
LNASSRGDRASL

SEQ ID NO: 203 - protein, 12 aa, synthetic construct
LNASSRGDRGAL

SEQ ID NO: 204 - protein, 12 aa, synthetic construct
LNASSRGDRGSL

SEQ ID NO: 205 - protein, 12 aa, synthetic construct
LNASSRGDRQAL

SEQ ID NO: 206 - protein, 12 aa, synthetic construct
LNASSRGDRQSL

SEQ ID NO: 207 - protein, 12 aa, synthetic construct
LNASSRGDRQYL

SEQ ID NO: 208 - protein, 12 aa, synthetic construct
LNASTRGDRAAL

SEQ ID NO: 209 - protein, 12 aa, synthetic construct
LNASTRGDRASL

SEQ ID NO: 210 - protein, 12 aa, synthetic construct
LNASTRGDRGAL

SEQ ID NO: 211 - protein, 12 aa, synthetic construct
LNASTRGDRGSL

SEQ ID NO: 212 - protein, 12 aa, synthetic construct
LNASTRGDRGYL

SEQ ID NO: 213 - protein, 12 aa, synthetic construct
LNASTRGDRQAL

SEQ ID NO: 214 - protein, 12 aa, synthetic construct
LNASTRGDRQSL

SEQ ID NO: 215 - protein, 12 aa, synthetic construct
LNASTRGDRQYL

SEQ ID NO: 216 - protein, 12 aa, synthetic construct
LNASVRGDRAAL

SEQ ID NO: 217 - protein, 12 aa, synthetic construct
LNASVRGDRASL

SEQ ID NO: 218 - protein, 12 aa, synthetic construct
LNASVRGDRGAL

SEQ ID NO: 219 - protein, 12 aa, synthetic construct
LNASVRGDRGSL

SEQ ID NO: 220 - protein, 12 aa, synthetic construct
LNASVRGDRQAL

SEQ ID NO: 221 - protein, 12 aa, synthetic construct
LNASVRGDRQSL

SEQ ID NO: 222 - protein, 12 aa, synthetic construct
LNASVRGDRQYL

SEQ ID NO: 223 - protein, 12 aa, synthetic construct
LNGNFRGDRQNL

SEQ ID NO: 224 - protein, 12 aa, synthetic construct
LNGNVRGDRGML

SEQ ID NO: 225 - protein, 12 aa, synthetic construct
LNGSARGDRAAL

SEQ ID NO: 226 - protein, 12 aa, synthetic construct
LNGSARGDRAYL

SEQ ID NO: 227 - protein, 12 aa, synthetic construct
LNGSARGDRGSL

SEQ ID NO: 228 - protein, 12 aa, synthetic construct
LNGSARGDRGYL

SEQ ID NO: 229 - protein, 12 aa, synthetic construct
LNGSARGDRQAL

SEQ ID NO: 230 - protein, 12 aa, synthetic construct
LNGSARGDRQSL

SEQ ID NO: 231 - protein, 12 aa, synthetic construct
LNGSARGDRQYL

SEQ ID NO: 232 - protein, 12 aa, synthetic construct
LNGSGRGDRAAL

SEQ ID NO: 233 - protein, 12 aa, synthetic construct
LNGSGRGDRAYL

SEQ ID NO: 234 - protein, 12 aa, synthetic construct
LNGSGRGDRGAL

SEQ ID NO: 235 - protein, 12 aa, synthetic construct
LNGSGRGDRGSL

SEQ ID NO: 236 - protein, 12 aa, synthetic construct
LNGSGRGDRGYL

SEQ ID NO: 237 - protein, 12 aa, synthetic construct
LNGSGRGDRQAL

SEQ ID NO: 238 - protein, 12 aa, synthetic construct
LNGSGRGDRQYL

SEQ ID NO: 239 - protein, 12 aa, synthetic construct
LNGSMRGDRASL

SEQ ID NO: 240 - protein, 12 aa, synthetic construct
LNGSMRGDRGYL

SEQ ID NO: 241 - protein, 12 aa, synthetic construct
LNGSMRGDRQAL

SEQ ID NO: 242 - protein, 12 aa, synthetic construct
LNGSMRGDRQSL

SEQ ID NO: 243 - protein, 12 aa, synthetic construct
LNGSMRGDRQYL

SEQ ID NO: 244 - protein, 12 aa, synthetic construct
LNGSSRGDRAAL

SEQ ID NO: 245 - protein, 12 aa, synthetic construct
LNGSSRGDRAYL

SEQ ID NO: 246 - protein, 12 aa, synthetic construct
LNGSSRGDRGAL

SEQ ID NO: 247 - protein, 12 aa, synthetic construct
LNGSSRGDRQYL

SEQ ID NO: 248 - protein, 12 aa, synthetic construct
LNGSTRGDRAAL

SEQ ID NO: 249 - protein, 12 aa, synthetic construct
LNGSTRGDRASL

SEQ ID NO: 250 - protein, 12 aa, synthetic construct
LNGSTRGDRAYL

SEQ ID NO: 251 - protein, 12 aa, synthetic construct
LNGSTRGDRGAL

SEQ ID NO: 252 - protein, 12 aa, synthetic construct
LNGSTRGDRGSL

SEQ ID NO: 253 - protein, 12 aa, synthetic construct
LNGSTRGDRGYL

SEQ ID NO: 254 - protein, 12 aa, synthetic construct
LNGSTRGDRQAL

SEQ ID NO: 255 - protein, 12 aa, synthetic construct
LNGSTRGDRQSL

SEQ ID NO: 256 - protein, 12 aa, synthetic construct
LNGSTRGDRQYL

SEQ ID NO: 257 - protein, 12 aa, synthetic construct
LNGSVRGDRASL

SEQ ID NO: 258 - protein, 12 aa, synthetic construct
LNGSVRGDRAYL

SEQ ID NO: 259 - protein, 12 aa, synthetic construct
LNGSVRGDRGYL

SEQ ID NO: 260 - protein, 12 aa, synthetic construct
LNGSVRGDRQAL

SEQ ID NO: 261 - protein, 12 aa, synthetic construct
LNGSVRGDRQSL

SEQ ID NO: 262 - protein, 12 aa, synthetic construct
LNGSVRGDRQYL

SEQ ID NO: 263 - protein, 12 aa, synthetic construct
LNSGMRGDRGAL

SEQ ID NO: 264 - protein, 12 aa, synthetic construct
LNSSARGDRASL

SEQ ID NO: 265 - protein, 12 aa, synthetic construct
LNSSARGDRAYL

SEQ ID NO: 266 - protein, 12 aa, synthetic construct
LNSSARGDRGAL

SEQ ID NO: 267 - protein, 12 aa, synthetic construct
LNSSARGDRGIL

SEQ ID NO: 268 - protein, 12 aa, synthetic construct
LNSSARGDRGSL

SEQ ID NO: 269 - protein, 12 aa, synthetic construct
LNSSARGDRGYL

SEQ ID NO: 270 - protein, 12 aa, synthetic construct
LNSSARGDRQAL

SEQ ID NO: 271 - protein, 12 aa, synthetic construct
LNSSARGDRQSL

SEQ ID NO: 272 - protein, 12 aa, synthetic construct
LNSSARGDRQYL

SEQ ID NO: 273 - protein, 12 aa, synthetic construct
LNSSGRGDRAAL

SEQ ID NO: 274 - protein, 12 aa, synthetic construct
LNSSGRGDRASL

SEQ ID NO: 275 - protein, 12 aa, synthetic construct
LNSSGRGDRAYL

SEQ ID NO: 276 - protein, 12 aa, synthetic construct
LNSSGRGDRGAL

SEQ ID NO: 277 - protein, 12 aa, synthetic construct
LNSSGRGDRGSL

SEQ ID NO: 278 - protein, 12 aa, synthetic construct
LNSSGRGDRGYL

SEQ ID NO: 279 - protein, 12 aa, synthetic construct
LNSSGRGDRQAL

SEQ ID NO: 280 - protein, 12 aa, synthetic construct
LNSSGRGDRQSL

SEQ ID NO: 281 - protein, 12 aa, synthetic construct
LNSSGRGDRQYL

SEQ ID NO: 282 - protein, 12 aa, synthetic construct
LNSSMRGDRAAL

SEQ ID NO: 283 - protein, 12 aa, synthetic construct
LNSSMRGDRASL

SEQ ID NO: 284 - protein, 12 aa, synthetic construct
LNSSMRGDRAYL

SEQ ID NO: 285 - protein, 12 aa, synthetic construct
LNSSMRGDRGAL

SEQ ID NO: 286 - protein, 12 aa, synthetic construct
LNSSMRGDRGSL

SEQ ID NO: 287 - protein, 12 aa, synthetic construct
LNSSMRGDRQAL

SEQ ID NO: 288 - protein, 12 aa, synthetic construct
LNSSMRGDRQSL

SEQ ID NO: 289 - protein, 12 aa, synthetic construct
LNSSMRGDRQYL

SEQ ID NO: 290 - protein, 12 aa, synthetic construct
LNSSSRGDRAAL

SEQ ID NO: 291 - protein, 12 aa, synthetic construct
LNSSSRGDRGAL

SEQ ID NO: 292 - protein, 12 aa, synthetic construct
LNSSSRGDRGSL

SEQ ID NO: 293 - protein, 12 aa, synthetic construct
LNSSSRGDRQAL

SEQ ID NO: 294 - protein, 12 aa, synthetic construct
LNSSSRGDRQSL

SEQ ID NO: 295 - protein, 12 aa, synthetic construct
LNSSSRGDRQYL

SEQ ID NO: 296 - protein, 12 aa, synthetic construct
LNSSTRGDRAAL

SEQ ID NO: 297 - protein, 12 aa, synthetic construct
LNSSTRGDRASL

SEQ ID NO: 298 - protein, 12 aa, synthetic construct
LNSSTRGDRGAL

SEQ ID NO: 299 - protein, 12 aa, synthetic construct
LNSSTRGDRGSL

SEQ ID NO: 300 - protein, 12 aa, synthetic construct
LNSSTRGDRQAL

SEQ ID NO: 301 - protein, 12 aa, synthetic construct
LNSSTRGDRQSL

SEQ ID NO: 302 - protein, 12 aa, synthetic construct
LNSSTRGDRQYL

SEQ ID NO: 303 - protein, 12 aa, synthetic construct
LNSSVRGDRAAL

SEQ ID NO: 304 - protein, 12 aa, synthetic construct
LNSSVRGDRASL

SEQ ID NO: 305 - protein, 12 aa, synthetic construct
LNSSVRGDRGAL

SEQ ID NO: 306 - protein, 12 aa, synthetic construct
LNSSVRGDRGSL

SEQ ID NO: 307 - protein, 12 aa, synthetic construct
LNSSVRGDRGYL

SEQ ID NO: 308 - protein, 12 aa, synthetic construct
LNSSVRGDRQAL

SEQ ID NO: 309 - protein, 12 aa, synthetic construct
LNSSVRGDRQSL

SEQ ID NO: 310 - protein, 12 aa, synthetic construct
LNSSVRGDRQYL

SEQ ID NO: 311 - protein, 12 aa, synthetic construct
LNTSARGDRAAL

SEQ ID NO: 312 - protein, 12 aa, synthetic construct
LNTSARGDRASL

SEQ ID NO: 313 - protein, 12 aa, synthetic construct
LNTSARGDRAYL

SEQ ID NO: 314 - protein, 12 aa, synthetic construct
LNTSARGDRGAL

SEQ ID NO: 315 - protein, 12 aa, synthetic construct
LNTSARGDRGSL

SEQ ID NO: 316 - protein, 12 aa, synthetic construct
LNTSARGDRGYL

SEQ ID NO: 317 - protein, 12 aa, synthetic construct
LNTSARGDRQAL

SEQ ID NO: 318 - protein, 12 aa, synthetic construct
LNTSARGDRQSL

SEQ ID NO: 319 - protein, 12 aa, synthetic construct
LNTSARGDRQYL

SEQ ID NO: 320 - protein, 12 aa, synthetic construct
LNTSGRGDRAAL

SEQ ID NO: 321 - protein, 12 aa, synthetic construct
LNTSGRGDRASL

SEQ ID NO: 322 - protein, 12 aa, synthetic construct
LNTSGRGDRAYL

SEQ ID NO: 323 - protein, 12 aa, synthetic construct
LNTSGRGDRGAL

SEQ ID NO: 324 - protein, 12 aa, synthetic construct
LNTSGRGDRGSL

SEQ ID NO: 325 - protein, 12 aa, synthetic construct
LNTSGRGDRGYL

SEQ ID NO: 326 - protein, 12 aa, synthetic construct
LNTSGRGDRQAL

SEQ ID NO: 327 - protein, 12 aa, synthetic construct
LNTSGRGDRQSL

SEQ ID NO: 328 - protein, 12 aa, synthetic construct
LNTSGRGDRQYL

SEQ ID NO: 329 - protein, 12 aa, synthetic construct
LNTSMRGDRAAL

SEQ ID NO: 330 - protein, 12 aa, synthetic construct
LNTSMRGDRASL

SEQ ID NO: 331 - protein, 12 aa, synthetic construct
LNTSMRGDRAYL

SEQ ID NO: 332 - protein, 12 aa, synthetic construct
LNTSMRGDRGAL

SEQ ID NO: 333 - protein, 12 aa, synthetic construct
LNTSMRGDRGSL

SEQ ID NO: 334 - protein, 12 aa, synthetic construct
LNTSMRGDRQAL

SEQ ID NO: 335 - protein, 12 aa, synthetic construct
LNTSMRGDRQSL

SEQ ID NO: 336 - protein, 12 aa, synthetic construct
LNTSMRGDRQYL

SEQ ID NO: 337 - protein, 12 aa, synthetic construct
LNTSSRGDRAAL

SEQ ID NO: 338 - protein, 12 aa, synthetic construct
LNTSSRGDRGSL

SEQ ID NO: 339 - protein, 12 aa, synthetic construct
LNTSSRGDRQAL

SEQ ID NO: 340 - protein, 12 aa, synthetic construct
LNTSSRGDRQSL

SEQ ID NO: 341 - protein, 12 aa, synthetic construct
LNTSSRGDRQYL

SEQ ID NO: 342 - protein, 12 aa, synthetic construct
LNTSTRGDRAAL

SEQ ID NO: 343 - protein, 12 aa, synthetic construct
LNTSTRGDRASL

SEQ ID NO: 344 - protein, 12 aa, synthetic construct
LNTSTRGDRGAL

SEQ ID NO: 345 - protein, 12 aa, synthetic construct
LNTSTRGDRGSL

SEQ ID NO: 346 - protein, 12 aa, synthetic construct
LNTSTRGDRQAL

SEQ ID NO: 347 - protein, 12 aa, synthetic construct
LNTSTRGDRQSL

SEQ ID NO: 348 - protein, 12 aa, synthetic construct
LNTSTRGDRQYL

SEQ ID NO: 349 - protein, 12 aa, synthetic construct
LNTSVRGDRAAL

SEQ ID NO: 350 - protein, 12 aa, synthetic construct
LNTSVRGDRASL

SEQ ID NO: 351 - protein, 12 aa, synthetic construct
LNTSVRGDRAYL

SEQ ID NO: 352 - protein, 12 aa, synthetic construct
LNTSVRGDRGAL

SEQ ID NO: 353 - protein, 12 aa, synthetic construct
LNTSVRGDRGSL

SEQ ID NO: 354 - protein, 12 aa, synthetic construct
LNTSVRGDRQAL

SEQ ID NO: 355 - protein, 12 aa, synthetic construct
LNTSVRGDRQSL

SEQ ID NO: 356 - protein, 12 aa, synthetic construct
LNYPHRGDRGAL

SEQ ID NO: 357 - protein, 12 aa, synthetic construct
LNYSARGDRGAL

SEQ ID NO: 358 - protein, 12 aa, synthetic construct
LNYSARGDRGSL

SEQ ID NO: 359 - protein, 12 aa, synthetic construct
LNYSARGDRQAL

SEQ ID NO: 360 - protein, 12 aa, synthetic construct
LNYSARGDRQSL

SEQ ID NO: 361 - protein, 12 aa, synthetic construct
LNYSARGDRQYL

SEQ ID NO: 362 - protein, 12 aa, synthetic construct
LNYSGRGDRAAL

SEQ ID NO: 363 - protein, 12 aa, synthetic construct
LNYSGRGDRASL

SEQ ID NO: 364 - protein, 12 aa, synthetic construct
LNYSGRGDRGAL

SEQ ID NO: 365 - protein, 12 aa, synthetic construct
LNYSGRGDRGSL

SEQ ID NO: 366 - protein, 12 aa, synthetic construct
LNYSGRGDRQAL

SEQ ID NO: 367 - protein, 12 aa, synthetic construct
LNYSGRGDRQSL

SEQ ID NO: 368 - protein, 12 aa, synthetic construct
LNYSGRGDRQYL

SEQ ID NO: 369 - protein, 12 aa, synthetic construct
LNYSMRGDRQAL

SEQ ID NO: 370 - protein, 12 aa, synthetic construct
LNYSMRGDRQSL

SEQ ID NO: 371 - protein, 12 aa, synthetic construct
LNYSSRGDRGAL

SEQ ID NO: 372 - protein, 12 aa, synthetic construct
LNYSSRGDRGSL

SEQ ID NO: 373 - protein, 12 aa, synthetic construct
LNYSSRGDRQAL

SEQ ID NO: 374 - protein, 12 aa, synthetic construct
LNYSSRGDRQSL

SEQ ID NO: 375 - protein, 12 aa, synthetic construct
LNYSSRGDRQYL

SEQ ID NO: 376 - protein, 12 aa, synthetic construct
LNYSTRGDRASL

SEQ ID NO: 377 - protein, 12 aa, synthetic construct
LNYSTRGDRGAL

SEQ ID NO: 378 - protein, 12 aa, synthetic construct
LNYSTRGDRGSL

SEQ ID NO: 379 - protein, 12 aa, synthetic construct
LNYSTRGDRQAL

SEQ ID NO: 380 - protein, 12 aa, synthetic construct
LNYSTRGDRQSL

SEQ ID NO: 381 - protein, 12 aa, synthetic construct
LNYSTRGDRQYL

SEQ ID NO: 382 - protein, 12 aa, synthetic construct
LNYSVRGDRQAL

SEQ ID NO: 383 - protein, 12 aa, synthetic construct
LNYSVRGDRQSL

SEQ ID NO: 384 - protein, 12 aa, synthetic construct
MNASARGDRAAL

SEQ ID NO: 385 - protein, 12 aa, synthetic construct
MNASARGDRAYL

SEQ ID NO: 386 - protein, 12 aa, synthetic construct
MNASARGDRGSL

SEQ ID NO: 387 - protein, 12 aa, synthetic construct
MNASARGDRGYL

SEQ ID NO: 388 - protein, 12 aa, synthetic construct
MNASARGDRQAL

SEQ ID NO: 389 - protein, 12 aa, synthetic construct
MNASARGDRQSL

SEQ ID NO: 390 - protein, 12 aa, synthetic construct
MNASARGDRQYL

SEQ ID NO: 391 - protein, 12 aa, synthetic construct
MNASGRGDRAAL

SEQ ID NO: 392 - protein, 12 aa, synthetic construct
MNASGRGDRASL

SEQ ID NO: 393 - protein, 12 aa, synthetic construct
MNASGRGDRAYL

SEQ ID NO: 394 - protein, 12 aa, synthetic construct
MNASGRGDRGSL

SEQ ID NO: 395 - protein, 12 aa, synthetic construct
MNASGRGDRQAL

SEQ ID NO: 396 - protein, 12 aa, synthetic construct
MNASGRGDRQSL

SEQ ID NO: 397 - protein, 12 aa, synthetic construct
MNASGRGDRQYL

SEQ ID NO: 398 - protein, 12 aa, synthetic construct
MNASIRGDRQLL

SEQ ID NO: 399 - protein, 12 aa, synthetic construct
MNASMRGDRAAL

SEQ ID NO: 400 - protein, 12 aa, synthetic construct
MNASMRGDRAYL

SEQ ID NO: 401 - protein, 12 aa, synthetic construct
MNASMRGDRGAL

SEQ ID NO: 402 - protein, 12 aa, synthetic construct
MNASMRGDRQAL

SEQ ID NO: 403 - protein, 12 aa, synthetic construct
MNASMRGDRQSL

SEQ ID NO: 404 - protein, 12 aa, synthetic construct
MNASSRGDRAAL

SEQ ID NO: 405 - protein, 12 aa, synthetic construct
MNASTRGDRAAL

SEQ ID NO: 406 - protein, 12 aa, synthetic construct
MNASTRGDRASL

SEQ ID NO: 407 - protein, 12 aa, synthetic construct
MNASTRGDRAYL

SEQ ID NO: 408 - protein, 12 aa, synthetic construct
MNASTRGDRGAL

SEQ ID NO: 409 - protein, 12 aa, synthetic construct
MNASTRGDRGSL

SEQ ID NO: 410 - protein, 12 aa, synthetic construct
MNASTRGDRQAL

SEQ ID NO: 411 - protein, 12 aa, synthetic construct
MNASTRGDRQSL

SEQ ID NO: 412 - protein, 12 aa, synthetic construct
MNASTRGDRQYL

SEQ ID NO: 413 - protein, 12 aa, synthetic construct
MNASVRGDRAAL

SEQ ID NO: 414 - protein, 12 aa, synthetic construct
MNASVRGDRASL

SEQ ID NO: 415 - protein, 12 aa, synthetic construct
MNASVRGDRAYL

SEQ ID NO: 416 - protein, 12 aa, synthetic construct
MNASVRGDRQAL

SEQ ID NO: 417 - protein, 12 aa, synthetic construct
MNASVRGDRQSL

SEQ ID NO: 418 - protein, 12 aa, synthetic construct
MNASVRGDRQYL

SEQ ID NO: 419 - protein, 12 aa, synthetic construct
MNGNFRGDRQNL

SEQ ID NO: 420 - protein, 12 aa, synthetic construct
MNGSARGDRAYL

SEQ ID NO: 421 - protein, 12 aa, synthetic construct
MNGSARGDRGYL

SEQ ID NO: 422 - protein, 12 aa, synthetic construct
MNGSARGDRQAL

SEQ ID NO: 423 - protein, 12 aa, synthetic construct
MNGSARGDRQSL

SEQ ID NO: 424 - protein, 12 aa, synthetic construct
MNGSARGDRQYL

SEQ ID NO: 425 - protein, 12 aa, synthetic construct
MNGSGRGDRAAL

SEQ ID NO: 426 - protein, 12 aa, synthetic construct
MNGSGRGDRAYL

SEQ ID NO: 427 - protein, 12 aa, synthetic construct
MNGSGRGDRGAL

SEQ ID NO: 428 - protein, 12 aa, synthetic construct
MNGSGRGDRGSL

SEQ ID NO: 429 - protein, 12 aa, synthetic construct
MNGSGRGDRGYL

SEQ ID NO: 430 - protein, 12 aa, synthetic construct
MNGSGRGDRQAL

SEQ ID NO: 431 - protein, 12 aa, synthetic construct
MNGSGRGDRQSL

SEQ ID NO: 432 - protein, 12 aa, synthetic construct
MNGSGRGDRQYL

SEQ ID NO: 433 - protein, 12 aa, synthetic construct
MNGSMRGDRQAL

SEQ ID NO: 434 - protein, 12 aa, synthetic construct
MNGSMRGDRQSL

SEQ ID NO: 435 - protein, 12 aa, synthetic construct
MNGSMRGDRQYL

SEQ ID NO: 436 - protein, 12 aa, synthetic construct
MNGSSRGDRQYL

SEQ ID NO: 437 - protein, 12 aa, synthetic construct
MNGSTRGDRAYL

SEQ ID NO: 438 - protein, 12 aa, synthetic construct
MNGSTRGDRGAL

SEQ ID NO: 439 - protein, 12 aa, synthetic construct
MNGSTRGDRGYL

SEQ ID NO: 440 - protein, 12 aa, synthetic construct
MNGSTRGDRQAL

SEQ ID NO: 441 - protein, 12 aa, synthetic construct
MNGSTRGDRQSL

SEQ ID NO: 442 - protein, 12 aa, synthetic construct
MNGSTRGDRQYL

SEQ ID NO: 443 - protein, 12 aa, synthetic construct
MNGSVRGDRGYL

SEQ ID NO: 444 - protein, 12 aa, synthetic construct
MNGSVRGDRQAL

SEQ ID NO: 445 - protein, 12 aa, synthetic construct
MNGSVRGDRQYL

SEQ ID NO: 446 - protein, 12 aa, synthetic construct
MNSGMRGDRGAL

SEQ ID NO: 447 - protein, 12 aa, synthetic construct
MNSSARGDRAAL

SEQ ID NO: 448 - protein, 12 aa, synthetic construct
MNSSARGDRAYL

SEQ ID NO: 449 - protein, 12 aa, synthetic construct
MNSSARGDRGSL

SEQ ID NO: 450 - protein, 12 aa, synthetic construct
MNSSARGDRGYL

SEQ ID NO: 451 - protein, 12 aa, synthetic construct
MNSSARGDRQAL

SEQ ID NO: 452 - protein, 12 aa, synthetic construct
MNSSARGDRQSL

SEQ ID NO: 453 - protein, 12 aa, synthetic construct
MNSSARGDRQYL

SEQ ID NO: 454 - protein, 12 aa, synthetic construct
MNSSGRGDRAAL

SEQ ID NO: 455 - protein, 12 aa, synthetic construct
MNSSGRGDRASL

SEQ ID NO: 456 - protein, 12 aa, synthetic construct
MNSSGRGDRAYL

SEQ ID NO: 457 - protein, 12 aa, synthetic construct
MNSSGRGDRGAL

SEQ ID NO: 458 - protein, 12 aa, synthetic construct
MNSSGRGDRGSL

SEQ ID NO: 459 - protein, 12 aa, synthetic construct
MNSSGRGDRQAL

SEQ ID NO: 460 - protein, 12 aa, synthetic construct
MNSSGRGDRQSL

SEQ ID NO: 461 - protein, 12 aa, synthetic construct
MNSSGRGDRQYL

SEQ ID NO: 462 - protein, 12 aa, synthetic construct
MNSSMRGDRAAL

SEQ ID NO: 463 - protein, 12 aa, synthetic construct
MNSSMRGDRASL

SEQ ID NO: 464 - protein, 12 aa, synthetic construct
MNSSMRGDRAYL

SEQ ID NO: 465 - protein, 12 aa, synthetic construct
MNSSMRGDRGSL

SEQ ID NO: 466 - protein, 12 aa, synthetic construct
MNSSMRGDRQAL

SEQ ID NO: 467 - protein, 12 aa, synthetic construct
MNSSMRGDRQSL

SEQ ID NO: 468 - protein, 12 aa, synthetic construct
MNSSMRGDRQYL

SEQ ID NO: 469 - protein, 12 aa, synthetic construct
MNSSSRGDRAAL

SEQ ID NO: 470 - protein, 12 aa, synthetic construct
MNSSTRGDRAAL

SEQ ID NO: 471 - protein, 12 aa, synthetic construct
MNSSTRGDRASL

SEQ ID NO: 472 - protein, 12 aa, synthetic construct
MNSSTRGDRQAL

SEQ ID NO: 473 - protein, 12 aa, synthetic construct
MNSSTRGDRQSL

SEQ ID NO: 474 - protein, 12 aa, synthetic construct
MNSSTRGDRQYL

SEQ ID NO: 475 - protein, 12 aa, synthetic construct
MNSSVRGDRAAL

SEQ ID NO: 476 - protein, 12 aa, synthetic construct
MNSSVRGDRAYL

SEQ ID NO: 477 - protein, 12 aa, synthetic construct
MNSSVRGDRQAL

SEQ ID NO: 478 - protein, 12 aa, synthetic construct
MNSSVRGDRQSL

SEQ ID NO: 479 - protein, 12 aa, synthetic construct
MNSSVRGDRQYL

SEQ ID NO: 480 - protein, 12 aa, synthetic construct
MNTSARGDRAYL

SEQ ID NO: 481 - protein, 12 aa, synthetic construct
MNTSGRGDRAAL

SEQ ID NO: 482 - protein, 12 aa, synthetic construct
MNTSGRGDRQAL

SEQ ID NO: 483 - protein, 12 aa, synthetic construct
MNTSGRGDRQYL

SEQ ID NO: 484 - protein, 12 aa, synthetic construct
MNTSMRGDRAYL

SEQ ID NO: 485 - protein, 12 aa, synthetic construct
MNTSTRGDRQYL

SEQ ID NO: 486 - protein, 12 aa, synthetic construct
MNYPHRGDRGAL

SEQ ID NO: 487 - protein, 12 aa, synthetic construct
MNYSARGDRAAL

SEQ ID NO: 488 - protein, 12 aa, synthetic construct
MNYSARGDRGYL

SEQ ID NO: 489 - protein, 12 aa, synthetic construct
MNYSARGDRQAL

SEQ ID NO: 490 - protein, 12 aa, synthetic construct
MNYSARGDRQSL

SEQ ID NO: 491 - protein, 12 aa, synthetic construct
MNYSGRGDRAAL

SEQ ID NO: 492 - protein, 12 aa, synthetic construct
MNYSGRGDRASL

SEQ ID NO: 493 - protein, 12 aa, synthetic construct
MNYSGRGDRGSL

SEQ ID NO: 494 - protein, 12 aa, synthetic construct
MNYSGRGDRQAL

SEQ ID NO: 495 - protein, 12 aa, synthetic construct
MNYSGRGDRQSL

SEQ ID NO: 496 - protein, 12 aa, synthetic construct
MNYSSRGDRQAL

SEQ ID NO: 497 - protein, 12 aa, synthetic construct
MNYSTRGDRAAL

SEQ ID NO: 498 - protein, 12 aa, synthetic construct
MNYSTRGDRQAL

SEQ ID NO: 499 - protein, 12 aa, synthetic construct
MNYSTRGDRQSL

SEQ ID NO: 500 - protein, 12 aa, synthetic construct
MNYSTRGDRQYL

SEQ ID NO: 501 - protein, 12 aa, synthetic construct
NNSGMRGDRGAL

SEQ ID NO: 502 - protein, 12 aa, synthetic construct
QNSGMRGDRGAL

SEQ ID NO: 503 - protein, 12 aa, synthetic construct
SNASARGDRAAL

SEQ ID NO: 504 - protein, 12 aa, synthetic construct
SNASARGDRASL

SEQ ID NO: 505 - protein, 12 aa, synthetic construct
SNASARGDRAYL

SEQ ID NO: 506 - protein, 12 aa, synthetic construct
SNASARGDRGAL

SEQ ID NO: 507 - protein, 12 aa, synthetic construct
SNASARGDRGSL

SEQ ID NO: 508 - protein, 12 aa, synthetic construct
SNASARGDRGYL

SEQ ID NO: 509 - protein, 12 aa, synthetic construct
SNASARGDRQAL

SEQ ID NO: 510 - protein, 12 aa, synthetic construct
SNASARGDRQSL

SEQ ID NO: 511 - protein, 12 aa, synthetic construct
SNASARGDRQYL

SEQ ID NO: 512 - protein, 12 aa, synthetic construct
SNASGRGDRAAL

SEQ ID NO: 513 - protein, 12 aa, synthetic construct
SNASGRGDRASL

SEQ ID NO: 514 - protein, 12 aa, synthetic construct
SNASGRGDRAYL

SEQ ID NO: 515 - protein, 12 aa, synthetic construct
SNASGRGDRGAL

SEQ ID NO: 516 - protein, 12 aa, synthetic construct
SNASGRGDRGSL

SEQ ID NO: 517 - protein, 12 aa, synthetic construct
SNASGRGDRGYL

SEQ ID NO: 518 - protein, 12 aa, synthetic construct
SNASGRGDRQAL

SEQ ID NO: 519 - protein, 12 aa, synthetic construct
SNASGRGDRQSL

SEQ ID NO: 520 - protein, 12 aa, synthetic construct
SNASGRGDRQYL

SEQ ID NO: 521 - protein, 12 aa, synthetic construct
SNASIRGDRQLL

SEQ ID NO: 522 - protein, 12 aa, synthetic construct
SNASMRGDRAAL

SEQ ID NO: 523 - protein, 12 aa, synthetic construct
SNASMRGDRASL

SEQ ID NO: 524 - protein, 12 aa, synthetic construct
SNASMRGDRGAL

SEQ ID NO: 525 - protein, 12 aa, synthetic construct
SNASMRGDRGSL

SEQ ID NO: 526 - protein, 12 aa, synthetic construct
SNASMRGDRQAL

SEQ ID NO: 527 - protein, 12 aa, synthetic construct
SNASMRGDRQSL

SEQ ID NO: 528 - protein, 12 aa, synthetic construct
SNASSRGDRAAL

SEQ ID NO: 529 - protein, 12 aa, synthetic construct
SNASSRGDRASL

SEQ ID NO: 530 - protein, 12 aa, synthetic construct
SNASSRGDRAYL

SEQ ID NO: 531 - protein, 12 aa, synthetic construct
SNASSRGDRGAL

SEQ ID NO: 532 - protein, 12 aa, synthetic construct
SNASSRGDRGSL

SEQ ID NO: 533 - protein, 12 aa, synthetic construct
SNASSRGDRQAL

SEQ ID NO: 534 - protein, 12 aa, synthetic construct
SNASSRGDRQSL

SEQ ID NO: 535 - protein, 12 aa, synthetic construct
SNASSRGDRQYL

SEQ ID NO: 536 - protein, 12 aa, synthetic construct
SNASTRGDRAAL

SEQ ID NO: 537 - protein, 12 aa, synthetic construct
SNASTRGDRASL

SEQ ID NO: 538 - protein, 12 aa, synthetic construct
SNASTRGDRAYL

SEQ ID NO: 539 - protein, 12 aa, synthetic construct
SNASTRGDRGAL

SEQ ID NO: 540 - protein, 12 aa, synthetic construct
SNASTRGDRGSL

SEQ ID NO: 541 - protein, 12 aa, synthetic construct
SNASTRGDRGYL

SEQ ID NO: 542 - protein, 12 aa, synthetic construct
SNASTRGDRQAL

SEQ ID NO: 543 - protein, 12 aa, synthetic construct
SNASTRGDRQSL

SEQ ID NO: 544 - protein, 12 aa, synthetic construct
SNASTRGDRQYL

SEQ ID NO: 545 - protein, 12 aa, synthetic construct
SNASVRGDRAAL

SEQ ID NO: 546 - protein, 12 aa, synthetic construct
SNASVRGDRASL

SEQ ID NO: 547 - protein, 12 aa, synthetic construct
SNASVRGDRAYL

SEQ ID NO: 548 - protein, 12 aa, synthetic construct
SNASVRGDRGSL

SEQ ID NO: 549 - protein, 12 aa, synthetic construct
SNASVRGDRGYL

SEQ ID NO: 550 - protein, 12 aa, synthetic construct
SNASVRGDRQAL

SEQ ID NO: 551 - protein, 12 aa, synthetic construct
SNASVRGDRQSL

SEQ ID NO: 552 - protein, 12 aa, synthetic construct
SNASVRGDRQYL

SEQ ID NO: 553 - protein, 12 aa, synthetic construct
SNGNFRGDRQNL

SEQ ID NO: 554 - protein, 12 aa, synthetic construct
SNGNVRGDRGML

SEQ ID NO: 555 - protein, 12 aa, synthetic construct
SNGSARGDRGYL

SEQ ID NO: 556 - protein, 12 aa, synthetic construct
SNGSARGDRQAL

SEQ ID NO: 557 - protein, 12 aa, synthetic construct
SNGSARGDRQSL

SEQ ID NO: 558 - protein, 12 aa, synthetic construct
SNGSARGDRQYL

SEQ ID NO: 559 - protein, 12 aa, synthetic construct
SNGSGRGDRASL

SEQ ID NO: 560 - protein, 12 aa, synthetic construct
SNGSGRGDRAYL

SEQ ID NO: 561 - protein, 12 aa, synthetic construct
SNGSGRGDRGAL

SEQ ID NO: 562 - protein, 12 aa, synthetic construct
SNGSGRGDRGSL

SEQ ID NO: 563 - protein, 12 aa, synthetic construct
SNGSGRGDRGYL

SEQ ID NO: 564 - protein, 12 aa, synthetic construct
SNGSGRGDRQAL

SEQ ID NO: 565 - protein, 12 aa, synthetic construct
SNGSGRGDRQSL

SEQ ID NO: 566 - protein, 12 aa, synthetic construct
SNGSGRGDRQYL

SEQ ID NO: 567 - protein, 12 aa, synthetic construct
SNGSMRGDRAYL

SEQ ID NO: 568 - protein, 12 aa, synthetic construct
SNGSMRGDRGYL

SEQ ID NO: 569 - protein, 12 aa, synthetic construct
SNGSMRGDRQAL

SEQ ID NO: 570 - protein, 12 aa, synthetic construct
SNGSMRGDRQSL

SEQ ID NO: 571 - protein, 12 aa, synthetic construct
SNGSMRGDRQYL

SEQ ID NO: 572 - protein, 12 aa, synthetic construct
SNGSSRGDRGYL

SEQ ID NO: 573 - protein, 12 aa, synthetic construct
SNGSSRGDRQYL

SEQ ID NO: 574 - protein, 12 aa, synthetic construct
SNGSTRGDRAAL

SEQ ID NO: 575 - protein, 12 aa, synthetic construct
SNGSTRGDRASL

SEQ ID NO: 576 - protein, 12 aa, synthetic construct
SNGSTRGDRGAL

SEQ ID NO: 577 - protein, 12 aa, synthetic construct
SNGSTRGDRGYL

SEQ ID NO: 578 - protein, 12 aa, synthetic construct
SNGSTRGDRQAL

SEQ ID NO: 579 - protein, 12 aa, synthetic construct
SNGSTRGDRQSL

SEQ ID NO: 580 - protein, 12 aa, synthetic construct
SNGSTRGDRQYL

SEQ ID NO: 581 - protein, 12 aa, synthetic construct
SNGSVRGDRGYL

SEQ ID NO: 582 - protein, 12 aa, synthetic construct
SNGSVRGDRQAL

SEQ ID NO: 583 - protein, 12 aa, synthetic construct
SNGSVRGDRQSL

SEQ ID NO: 584 - protein, 12 aa, synthetic construct
SNGSVRGDRQYL

SEQ ID NO: 585 - protein, 12 aa, synthetic construct
SNSGMRGDRGAL

SEQ ID NO: 586 - protein, 12 aa, synthetic construct
SNSSARGDRAYL

SEQ ID NO: 587 - protein, 12 aa, synthetic construct
SNSSARGDRGAL

SEQ ID NO: 588 - protein, 12 aa, synthetic construct
SNSSARGDRGIL

SEQ ID NO: 589 - protein, 12 aa, synthetic construct
SNSSARGDRGSL

SEQ ID NO: 590 - protein, 12 aa, synthetic construct
SNSSARGDRGYL

SEQ ID NO: 591 - protein, 12 aa, synthetic construct
SNSSARGDRQAL

SEQ ID NO: 592 - protein, 12 aa, synthetic construct
SNSSARGDRQSL

SEQ ID NO: 593 - protein, 12 aa, synthetic construct
SNSSARGDRQYL

SEQ ID NO: 594 - protein, 12 aa, synthetic construct
SNSSGRGDRAAL

SEQ ID NO: 595 - protein, 12 aa, synthetic construct
SNSSGRGDRAYL

SEQ ID NO: 596 - protein, 12 aa, synthetic construct
SNSSGRGDRGAL

SEQ ID NO: 597 - protein, 12 aa, synthetic construct
SNSSGRGDRGSL

SEQ ID NO: 598 - protein, 12 aa, synthetic construct
SNSSGRGDRGYL

SEQ ID NO: 599 - protein, 12 aa, synthetic construct
SNSSGRGDRQAL

SEQ ID NO: 600 - protein, 12 aa, synthetic construct
SNSSGRGDRQSL

SEQ ID NO: 601 - protein, 12 aa, synthetic construct
SNSSGRGDRQYL

SEQ ID NO: 602 - protein, 12 aa, synthetic construct
SNSSMRGDRAAL

SEQ ID NO: 603 - protein, 12 aa, synthetic construct
SNSSMRGDRASL

SEQ ID NO: 604 - protein, 12 aa, synthetic construct
SNSSMRGDRAYL

SEQ ID NO: 605 - protein, 12 aa, synthetic construct
SNSSMRGDRGSL

SEQ ID NO: 606 - protein, 12 aa, synthetic construct
SNSSMRGDRQAL

SEQ ID NO: 607 - protein, 12 aa, synthetic construct
SNSSMRGDRQSL

SEQ ID NO: 608 - protein, 12 aa, synthetic construct
SNSSMRGDRQYL

SEQ ID NO: 609 - protein, 12 aa, synthetic construct
SNSSSRGDRAAL

SEQ ID NO: 610 - protein, 12 aa, synthetic construct
SNSSSRGDRGSL

SEQ ID NO: 611 - protein, 12 aa, synthetic construct
SNSSSRGDRQAL

SEQ ID NO: 612 - protein, 12 aa, synthetic construct
SNSSSRGDRQSL

SEQ ID NO: 613 - protein, 12 aa, synthetic construct
SNSSSRGDRQYL

SEQ ID NO: 614 - protein, 12 aa, synthetic construct
SNSSTRGDRAAL

SEQ ID NO: 615 - protein, 12 aa, synthetic construct
SNSSTRGDRASL

SEQ ID NO: 616 - protein, 12 aa, synthetic construct
SNSSTRGDRGSL

SEQ ID NO: 617 - protein, 12 aa, synthetic construct
SNSSTRGDRGYL

SEQ ID NO: 618 - protein, 12 aa, synthetic construct
SNSSTRGDRQAL

SEQ ID NO: 619 - protein, 12 aa, synthetic construct
SNSSTRGDRQSL

SEQ ID NO: 620 - protein, 12 aa, synthetic construct
SNSSTRGDRQYL

SEQ ID NO: 621 - protein, 12 aa, synthetic construct
SNSSVRGDRQAL

SEQ ID NO: 622 - protein, 12 aa, synthetic construct
SNSSVRGDRQSL

SEQ ID NO: 623 - protein, 12 aa, synthetic construct
SNSSVRGDRQYL

SEQ ID NO: 624 - protein, 12 aa, synthetic construct
SNTSARGDRAAL

SEQ ID NO: 625 - protein, 12 aa, synthetic construct
SNTSARGDRGAL

SEQ ID NO: 626 - protein, 12 aa, synthetic construct
SNTSARGDRGSL

SEQ ID NO: 627 - protein, 12 aa, synthetic construct
SNTSARGDRGYL

SEQ ID NO: 628 - protein, 12 aa, synthetic construct
SNTSARGDRQAL

SEQ ID NO: 629 - protein, 12 aa, synthetic construct
SNTSARGDRQSL

SEQ ID NO: 630 - protein, 12 aa, synthetic construct
SNTSARGDRQYL

SEQ ID NO: 631 - protein, 12 aa, synthetic construct
SNTSGRGDRAAL

SEQ ID NO: 632 - protein, 12 aa, synthetic construct
SNTSGRGDRASL

SEQ ID NO: 633 - protein, 12 aa, synthetic construct
SNTSGRGDRGAL

SEQ ID NO: 634 - protein, 12 aa, synthetic construct
SNTSGRGDRGSL

SEQ ID NO: 635 - protein, 12 aa, synthetic construct
SNTSGRGDRGYL

SEQ ID NO: 636 - protein, 12 aa, synthetic construct
SNTSGRGDRQAL

SEQ ID NO: 637 - protein, 12 aa, synthetic construct
SNTSGRGDRQSL

SEQ ID NO: 638 - protein, 12 aa, synthetic construct
SNTSGRGDRQYL

SEQ ID NO: 639 - protein, 12 aa, synthetic construct
SNTSMRGDRAYL

SEQ ID NO: 640 - protein, 12 aa, synthetic construct
SNTSMRGDRGSL

SEQ ID NO: 641 - protein, 12 aa, synthetic construct
SNTSMRGDRQAL

SEQ ID NO: 642 - protein, 12 aa, synthetic construct
SNTSMRGDRQSL

SEQ ID NO: 643 - protein, 12 aa, synthetic construct
SNTSSRGDRQAL

SEQ ID NO: 644 - protein, 12 aa, synthetic construct
SNTSTRGDRQAL

SEQ ID NO: 645 - protein, 12 aa, synthetic construct
SNTSTRGDRQSL

SEQ ID NO: 646 - protein, 12 aa, synthetic construct
SNTSTRGDRQYL

SEQ ID NO: 647 - protein, 12 aa, synthetic construct
SNTSVRGDRAYL

SEQ ID NO: 648 - protein, 12 aa, synthetic construct
SNTSVRGDRQAL

SEQ ID NO: 649 - protein, 12 aa, synthetic construct
SNTSVRGDRQSL

SEQ ID NO: 650 - protein, 12 aa, synthetic construct
SNTSVRGDRQYL

SEQ ID NO: 651 - protein, 12 aa, synthetic construct
SNYPHRGDRGAL

SEQ ID NO: 652 - protein, 12 aa, synthetic construct
SNYSARGDRAAL

SEQ ID NO: 653 - protein, 12 aa, synthetic construct
SNYSARGDRASL

SEQ ID NO: 654 - protein, 12 aa, synthetic construct
SNYSARGDRGAL

SEQ ID NO: 655 - protein, 12 aa, synthetic construct
SNYSARGDRGSL

SEQ ID NO: 656 - protein, 12 aa, synthetic construct
SNYSARGDRQAL

SEQ ID NO: 657 - protein, 12 aa, synthetic construct
SNYSARGDRQSL

SEQ ID NO: 658 - protein, 12 aa, synthetic construct
SNYSARGDRQYL

SEQ ID NO: 659 - protein, 12 aa, synthetic construct
SNYSGRGDRAAL

SEQ ID NO: 660 - protein, 12 aa, synthetic construct
SNYSGRGDRGAL

SEQ ID NO: 661 - protein, 12 aa, synthetic construct
SNYSGRGDRGSL

SEQ ID NO: 662 - protein, 12 aa, synthetic construct
SNYSGRGDRQAL

SEQ ID NO: 663 - protein, 12 aa, synthetic construct
SNYSGRGDRQSL

SEQ ID NO: 664 - protein, 12 aa, synthetic construct
SNYSMRGDRAAL

SEQ ID NO: 665 - protein, 12 aa, synthetic construct
SNYSMRGDRASL

SEQ ID NO: 666 - protein, 12 aa, synthetic construct
SNYSMRGDRGSL

SEQ ID NO: 667 - protein, 12 aa, synthetic construct
SNYSMRGDRQAL

SEQ ID NO: 668 - protein, 12 aa, synthetic construct
SNYSMRGDRQSL

SEQ ID NO: 669 - protein, 12 aa, synthetic construct
SNYSSRGDRGAL

SEQ ID NO: 670 - protein, 12 aa, synthetic construct
SNYSSRGDRGSL

SEQ ID NO: 671 - protein, 12 aa, synthetic construct
SNYSSRGDRQAL

SEQ ID NO: 672 - protein, 12 aa, synthetic construct
SNYSSRGDRQSL

SEQ ID NO: 673 - protein, 12 aa, synthetic construct
SNYSTRGDRAAL

SEQ ID NO: 674 - protein, 12 aa, synthetic construct
SNYSTRGDRGAL

SEQ ID NO: 675 - protein, 12 aa, synthetic construct
SNYSTRGDRGSL

SEQ ID NO: 676 - protein, 12 aa, synthetic construct
SNYSTRGDRQAL

SEQ ID NO: 677 - protein, 12 aa, synthetic construct
SNYSTRGDRQSL

SEQ ID NO: 678 - protein, 12 aa, synthetic construct
SNYSTRGDRQYL

SEQ ID NO: 679 - protein, 12 aa, synthetic construct
SNYSVRGDRQAL

SEQ ID NO: 680 - protein, 12 aa, synthetic construct
SNYSVRGDRQSL

SEQ ID NO: 681 - protein, 12 aa, synthetic construct
SNYSVRGDRQYL

SEQ ID NO: 682 - protein, 12 aa, synthetic construct
TNSGMRGDRGAL

SEQ ID NO: 683 - protein, 12 aa, synthetic construct
VNASARGDRAAL

SEQ ID NO: 684 - protein, 12 aa, synthetic construct
VNASARGDRGAL

SEQ ID NO: 685 - protein, 12 aa, synthetic construct
VNASARGDRGSL

SEQ ID NO: 686 - protein, 12 aa, synthetic construct
VNASARGDRGYL

SEQ ID NO: 687 - protein, 12 aa, synthetic construct
VNASARGDRQAL

SEQ ID NO: 688 - protein, 12 aa, synthetic construct
VNASARGDRQYL

SEQ ID NO: 689 - protein, 12 aa, synthetic construct
VNASGRGDRAAL

SEQ ID NO: 690 - protein, 12 aa, synthetic construct
VNASGRGDRAYL

SEQ ID NO: 691 - protein, 12 aa, synthetic construct
VNASGRGDRGAL

SEQ ID NO: 692 - protein, 12 aa, synthetic construct
VNASGRGDRGSL

SEQ ID NO: 693 - protein, 12 aa, synthetic construct
VNASGRGDRGYL

SEQ ID NO: 694 - protein, 12 aa, synthetic construct
VNASGRGDRQAL

SEQ ID NO: 695 - protein, 12 aa, synthetic construct
VNASGRGDRQYL

SEQ ID NO: 696 - protein, 12 aa, synthetic construct
VNASMRGDRAYL

SEQ ID NO: 697 - protein, 12 aa, synthetic construct
VNASMRGDRQAL

SEQ ID NO: 698 - protein, 12 aa, synthetic construct
VNASMRGDRQSL

SEQ ID NO: 699 - protein, 12 aa, synthetic construct
VNASSRGDRGSL

SEQ ID NO: 700 - protein, 12 aa, synthetic construct
VNASSRGDRQAL

SEQ ID NO: 701 - protein, 12 aa, synthetic construct
VNASSRGDRQYL

SEQ ID NO: 702 - protein, 12 aa, synthetic construct
VNASTRGDRAAL

SEQ ID NO: 703 - protein, 12 aa, synthetic construct
VNASTRGDRGAL

SEQ ID NO: 704 - protein, 12 aa, synthetic construct
VNASTRGDRGSL

SEQ ID NO: 705 - protein, 12 aa, synthetic construct
VNASTRGDRGYL

SEQ ID NO: 706 - protein, 12 aa, synthetic construct
VNASTRGDRQAL

SEQ ID NO: 707 - protein, 12 aa, synthetic construct
VNASTRGDRQSL

SEQ ID NO: 708 - protein, 12 aa, synthetic construct
VNASTRGDRQYL

SEQ ID NO: 709 - protein, 12 aa, synthetic construct
VNASVRGDRGSL

SEQ ID NO: 710 - protein, 12 aa, synthetic construct
VNASVRGDRGYL

SEQ ID NO: 711 - protein, 12 aa, synthetic construct
VNASVRGDRQAL

SEQ ID NO: 712 - protein, 12 aa, synthetic construct
VNASVRGDRQSL

SEQ ID NO: 713 - protein, 12 aa, synthetic construct
VNASVRGDRQYL

SEQ ID NO: 714 - protein, 12 aa, synthetic construct
VNGNFRGDRQNL

SEQ ID NO: 715 - protein, 12 aa, synthetic construct
VNGNVRGDRGML

SEQ ID NO: 716 - protein, 12 aa, synthetic construct
VNGSARGDRAYL

SEQ ID NO: 717 - protein, 12 aa, synthetic construct
VNGSARGDRGAL

SEQ ID NO: 718 - protein, 12 aa, synthetic construct
VNGSARGDRGSL

SEQ ID NO: 719 - protein, 12 aa, synthetic construct
VNGSARGDRGYL

SEQ ID NO: 720 - protein, 12 aa, synthetic construct
VNGSARGDRQAL

SEQ ID NO: 721 - protein, 12 aa, synthetic construct
VNGSARGDRQSL

SEQ ID NO: 722 - protein, 12 aa, synthetic construct
VNGSARGDRQYL

SEQ ID NO: 723 - protein, 12 aa, synthetic construct
VNGSGRGDRAAL

SEQ ID NO: 724 - protein, 12 aa, synthetic construct
VNGSGRGDRASL

SEQ ID NO: 725 - protein, 12 aa, synthetic construct
VNGSGRGDRAYL

SEQ ID NO: 726 - protein, 12 aa, synthetic construct
VNGSGRGDRGAL

SEQ ID NO: 727 - protein, 12 aa, synthetic construct
VNGSGRGDRGSL

SEQ ID NO: 728 - protein, 12 aa, synthetic construct
VNGSGRGDRGYL

SEQ ID NO: 729 - protein, 12 aa, synthetic construct
VNGSGRGDRQAL

SEQ ID NO: 730 - protein, 12 aa, synthetic construct
VNGSGRGDRQSL

SEQ ID NO: 731 - protein, 12 aa, synthetic construct
VNGSGRGDRQYL

SEQ ID NO: 732 - protein, 12 aa, synthetic construct
VNGSMRGDRGYL

SEQ ID NO: 733 - protein, 12 aa, synthetic construct
VNGSMRGDRQAL

SEQ ID NO: 734 - protein, 12 aa, synthetic construct
VNGSMRGDRQSL

SEQ ID NO: 735 - protein, 12 aa, synthetic construct
VNGSMRGDRQYL

SEQ ID NO: 736 - protein, 12 aa, synthetic construct
VNGSSRGDRAYL

SEQ ID NO: 737 - protein, 12 aa, synthetic construct
VNGSSRGDRGAL

SEQ ID NO: 738 - protein, 12 aa, synthetic construct
VNGSSRGDRGSL

SEQ ID NO: 739 - protein, 12 aa, synthetic construct
VNGSSRGDRQAL

SEQ ID NO: 740 - protein, 12 aa, synthetic construct
VNGSSRGDRQSL

SEQ ID NO: 741 - protein, 12 aa, synthetic construct
VNGSSRGDRQYL

SEQ ID NO: 742 - protein, 12 aa, synthetic construct
VNGSTRGDRAAL

SEQ ID NO: 743 - protein, 12 aa, synthetic construct
VNGSTRGDRAYL

SEQ ID NO: 744 - protein, 12 aa, synthetic construct
VNGSTRGDRGAL

SEQ ID NO: 745 - protein, 12 aa, synthetic construct
VNGSTRGDRGYL

SEQ ID NO: 746 - protein, 12 aa, synthetic construct
VNGSTRGDRQAL

SEQ ID NO: 747 - protein, 12 aa, synthetic construct
VNGSTRGDRQSL

SEQ ID NO: 748 - protein, 12 aa, synthetic construct
VNGSTRGDRQYL

SEQ ID NO: 749 - protein, 12 aa, synthetic construct
VNGSVRGDRAYL

SEQ ID NO: 750 - protein, 12 aa, synthetic construct
VNGSVRGDRQAL

SEQ ID NO: 751 - protein, 12 aa, synthetic construct
VNGSVRGDRQSL

SEQ ID NO: 752 - protein, 12 aa, synthetic construct
VNGSVRGDRQYL

SEQ ID NO: 753 - protein, 12 aa, synthetic construct
VNSGMRGDRGAL

SEQ ID NO: 754 - protein, 12 aa, synthetic construct
VNSSARGDRGAL

SEQ ID NO: 755 - protein, 12 aa, synthetic construct
VNSSARGDRGSL

SEQ ID NO: 756 - protein, 12 aa, synthetic construct
VNSSARGDRGYL

SEQ ID NO: 757 - protein, 12 aa, synthetic construct
VNSSARGDRQAL

SEQ ID NO: 758 - protein, 12 aa, synthetic construct
VNSSARGDRQSL

SEQ ID NO: 759 - protein, 12 aa, synthetic construct
VNSSARGDRQYL

SEQ ID NO: 760 - protein, 12 aa, synthetic construct
VNSSGRGDRAAL

SEQ ID NO: 761 - protein, 12 aa, synthetic construct
VNSSGRGDRAYL

SEQ ID NO: 762 - protein, 12 aa, synthetic construct
VNSSGRGDRGAL

SEQ ID NO: 763 - protein, 12 aa, synthetic construct
VNSSGRGDRQAL

SEQ ID NO: 764 - protein, 12 aa, synthetic construct
VNSSGRGDRQSL

SEQ ID NO: 765 - protein, 12 aa, synthetic construct
VNSSGRGDRQYL

SEQ ID NO: 766 - protein, 12 aa, synthetic construct
VNSSMRGDRAYL

SEQ ID NO: 767 - protein, 12 aa, synthetic construct
VNSSMRGDRQAL

SEQ ID NO: 768 - protein, 12 aa, synthetic construct
VNSSMRGDRQSL

SEQ ID NO: 769 - protein, 12 aa, synthetic construct
VNSSMRGDRQYL

SEQ ID NO: 770 - protein, 12 aa, synthetic construct
VNSSSRGDRGSL

SEQ ID NO: 771 - protein, 12 aa, synthetic construct
VNSSSRGDRQAL

SEQ ID NO: 772 - protein, 12 aa, synthetic construct
VNSSSRGDRQSL

SEQ ID NO: 773 - protein, 12 aa, synthetic construct
VNSSTRGDRGAL

SEQ ID NO: 774 - protein, 12 aa, synthetic construct
VNSSTRGDRQAL

SEQ ID NO: 775 - protein, 12 aa, synthetic construct
VNSSTRGDRQSL

SEQ ID NO: 776 - protein, 12 aa, synthetic construct
VNSSTRGDRQYL

SEQ ID NO: 777 - protein, 12 aa, synthetic construct
VNSSVRGDRAYL

SEQ ID NO: 778 - protein, 12 aa, synthetic construct
VNSSVRGDRQAL

SEQ ID NO: 779 - protein, 12 aa, synthetic construct
VNSSVRGDRQSL

SEQ ID NO: 780 - protein, 12 aa, synthetic construct
VNTSARGDRAYL

SEQ ID NO: 781 - protein, 12 aa, synthetic construct
VNTSGRGDRAAL

SEQ ID NO: 782 - protein, 12 aa, synthetic construct
VNTSGRGDRGAL

SEQ ID NO: 783 - protein, 12 aa, synthetic construct
VNTSGRGDRGSL

SEQ ID NO: 784 - protein, 12 aa, synthetic construct
VNTSGRGDRGYL

SEQ ID NO: 785 - protein, 12 aa, synthetic construct
VNTSGRGDRQAL

SEQ ID NO: 786 - protein, 12 aa, synthetic construct
VNTSGRGDRQSL

SEQ ID NO: 787 - protein, 12 aa, synthetic construct
VNTSGRGDRQYL

SEQ ID NO: 788 - protein, 12 aa, synthetic construct
VNTSTRGDRAYL

SEQ ID NO: 789 - protein, 12 aa, synthetic construct
VNYPHRGDRGAL

SEQ ID NO: 790 - protein, 12 aa, synthetic construct
VNYSARGDRGAL

SEQ ID NO: 791 - protein, 12 aa, synthetic construct
VNYSARGDRGSL

SEQ ID NO: 792 - protein, 12 aa, synthetic construct
VNYSARGDRQAL

SEQ ID NO: 793 - protein, 12 aa, synthetic construct
VNYSARGDRQSL

SEQ ID NO: 794 - protein, 12 aa, synthetic construct
VNYSGRGDRAAL

SEQ ID NO: 795 - protein, 12 aa, synthetic construct
VNYSGRGDRGAL

SEQ ID NO: 796 - protein, 12 aa, synthetic construct
VNYSGRGDRQAL

SEQ ID NO: 797 - protein, 12 aa, synthetic construct
VNYSGRGDRQSL

SEQ ID NO: 798 - protein, 12 aa, synthetic construct
VNYSGRGDRQYL

SEQ ID NO: 799 - protein, 12 aa, synthetic construct
VNYSSRGDRGSL

SEQ ID NO: 800 - protein, 12 aa, synthetic construct
VNYSSRGDRGYL

SEQ ID NO: 801 - protein, 5 aa, synthetic construct
ANASA

SEQ ID NO: 802 - protein, 5 aa, synthetic construct
ANASA

SEQ ID NO: 803 - protein, 5 aa, synthetic construct
ANASA

SEQ ID NO: 804 - protein, 5 aa, synthetic construct
ANASA

SEQ ID NO: 805 - protein, 5 aa, synthetic construct
ANASA

SEQ ID NO: 806 - protein, 5 aa, synthetic construct
ANASA

SEQ ID NO: 807 - protein, 5 aa, synthetic construct
ANASG

SEQ ID NO: 808 - protein, 5 aa, synthetic construct
ANASG

SEQ ID NO: 809 - protein, 5 aa, synthetic construct
ANASG

SEQ ID NO: 810 - protein, 5 aa, synthetic construct
ANASG

SEQ ID NO: 811 - protein, 5 aa, synthetic construct
ANASG

SEQ ID NO: 812 - protein, 5 aa, synthetic construct
ANASG

SEQ ID NO: 813 - protein, 5 aa, synthetic construct
ANASG

SEQ ID NO: 814 - protein, 5 aa, synthetic construct
ANASG

SEQ ID NO: 815 - protein, 5 aa, synthetic construct
ANASG

SEQ ID NO: 816 - protein, 5 aa, synthetic construct
ANASM

SEQ ID NO: 817 - protein, 5 aa, synthetic construct
ANASM

SEQ ID NO: 818 - protein, 5 aa, synthetic construct
ANASM

SEQ ID NO: 819 - protein, 5 aa, synthetic construct
ANASM

SEQ ID NO: 820 - protein, 5 aa, synthetic construct
ANASM

SEQ ID NO: 821 - protein, 5 aa, synthetic construct
ANASS

SEQ ID NO: 822 - protein, 5 aa, synthetic construct
ANASS

SEQ ID NO: 823 - protein, 5 aa, synthetic construct
ANASS

SEQ ID NO: 824 - protein, 5 aa, synthetic construct
ANASS

SEQ ID NO: 825 - protein, 5 aa, synthetic construct
ANASS

SEQ ID NO: 826 - protein, 5 aa, synthetic construct
ANAST

SEQ ID NO: 827 - protein, 5 aa, synthetic construct
ANAST

SEQ ID NO: 828 - protein, 5 aa, synthetic construct
ANAST

SEQ ID NO: 829 - protein, 5 aa, synthetic construct
ANAST

SEQ ID NO: 830 - protein, 5 aa, synthetic construct
ANAST

SEQ ID NO: 831 - protein, 5 aa, synthetic construct
ANAST

SEQ ID NO: 832 - protein, 5 aa, synthetic construct
ANAST

SEQ ID NO: 833 - protein, 5 aa, synthetic construct
ANAST

SEQ ID NO: 834 - protein, 5 aa, synthetic construct
ANASV

SEQ ID NO: 835 - protein, 5 aa, synthetic construct
ANASV

SEQ ID NO: 836 - protein, 5 aa, synthetic construct
ANASV

SEQ ID NO: 837 - protein, 5 aa, synthetic construct
ANASV

SEQ ID NO: 838 - protein, 5 aa, synthetic construct
ANASV

SEQ ID NO: 839 - protein, 5 aa, synthetic construct
ANGNF

SEQ ID NO: 840 - protein, 5 aa, synthetic construct
ANGNV

SEQ ID NO: 841 - protein, 5 aa, synthetic construct
ANGSA

SEQ ID NO: 842 - protein, 5 aa, synthetic construct
ANGSA

SEQ ID NO: 843 - protein, 5 aa, synthetic construct
ANGSA

SEQ ID NO: 844 - protein, 5 aa, synthetic construct
ANGSA

SEQ ID NO: 845 - protein, 5 aa, synthetic construct
ANGSA

SEQ ID NO: 846 - protein, 5 aa, synthetic construct
ANGSG

SEQ ID NO: 847 - protein, 5 aa, synthetic construct
ANGSG

SEQ ID NO: 848 - protein, 5 aa, synthetic construct
ANGSG

SEQ ID NO: 849 - protein, 5 aa, synthetic construct
ANGSG

SEQ ID NO: 850 - protein, 5 aa, synthetic construct
ANGSG

SEQ ID NO: 851 - protein, 5 aa, synthetic construct
ANGSG

SEQ ID NO: 852 - protein, 5 aa, synthetic construct
ANGSG

SEQ ID NO: 853 - protein, 5 aa, synthetic construct
ANGSG

SEQ ID NO: 854 - protein, 5 aa, synthetic construct
ANGSM

SEQ ID NO: 855 - protein, 5 aa, synthetic construct
ANGSM

SEQ ID NO: 856 - protein, 5 aa, synthetic construct
ANGSM

SEQ ID NO: 857 - protein, 5 aa, synthetic construct
ANGSM

SEQ ID NO: 858 - protein, 5 aa, synthetic construct
ANGSS

SEQ ID NO: 859 - protein, 5 aa, synthetic construct
ANGSS

SEQ ID NO: 860 - protein, 5 aa, synthetic construct
ANGSS

SEQ ID NO: 861 - protein, 5 aa, synthetic construct
ANGSS

SEQ ID NO: 862 - protein, 5 aa, synthetic construct
ANGSS

SEQ ID NO: 863 - protein, 5 aa, synthetic construct
ANGSS

SEQ ID NO: 864 - protein, 5 aa, synthetic construct
ANGST

SEQ ID NO: 865 - protein, 5 aa, synthetic construct
ANGST

SEQ ID NO: 866 - protein, 5 aa, synthetic construct
ANGST

SEQ ID NO: 867 - protein, 5 aa, synthetic construct
ANGST

SEQ ID NO: 868 - protein, 5 aa, synthetic construct
ANGST

SEQ ID NO: 869 - protein, 5 aa, synthetic construct
ANGST

SEQ ID NO: 870 - protein, 5 aa, synthetic construct
ANGST

SEQ ID NO: 871 - protein, 5 aa, synthetic construct
ANGSV

SEQ ID NO: 872 - protein, 5 aa, synthetic construct
ANGSV

SEQ ID NO: 873 - protein, 5 aa, synthetic construct
ANGSV

SEQ ID NO: 874 - protein, 5 aa, synthetic construct
ANGSV

SEQ ID NO: 875 - protein, 5 aa, synthetic construct
ANSGM

SEQ ID NO: 876 - protein, 5 aa, synthetic construct
ANSSA

SEQ ID NO: 877 - protein, 5 aa, synthetic construct
ANSSA

SEQ ID NO: 878 - protein, 5 aa, synthetic construct
ANSSA

SEQ ID NO: 879 - protein, 5 aa, synthetic construct
ANSSA

SEQ ID NO: 880 - protein, 5 aa, synthetic construct
ANSSA

SEQ ID NO: 881 - protein, 5 aa, synthetic construct
ANSSA

SEQ ID NO: 882 - protein, 5 aa, synthetic construct
ANSSG

SEQ ID NO: 883 - protein, 5 aa, synthetic construct
ANSSG

SEQ ID NO: 884 - protein, 5 aa, synthetic construct
ANSSG

SEQ ID NO: 885 - protein, 5 aa, synthetic construct
ANSSG

SEQ ID NO: 886 - protein, 5 aa, synthetic construct
ANSSG

SEQ ID NO: 887 - protein, 5 aa, synthetic construct
ANSSG

SEQ ID NO: 888 - protein, 5 aa, synthetic construct
ANSSG

SEQ ID NO: 889 - protein, 5 aa, synthetic construct
ANSSG

SEQ ID NO: 890 - protein, 5 aa, synthetic construct
ANSSG

SEQ ID NO: 891 - protein, 5 aa, synthetic construct
ANSSM

SEQ ID NO: 892 - protein, 5 aa, synthetic construct
ANSSM

SEQ ID NO: 893 - protein, 5 aa, synthetic construct
ANSSM

SEQ ID NO: 894 - protein, 5 aa, synthetic construct
ANSSM

SEQ ID NO: 895 - protein, 5 aa, synthetic construct
ANSSS

SEQ ID NO: 896 - protein, 5 aa, synthetic construct
ANSSS

SEQ ID NO: 897 - protein, 5 aa, synthetic construct
ANSSS

SEQ ID NO: 898 - protein, 5 aa, synthetic construct
ANSSS

SEQ ID NO: 899 - protein, 5 aa, synthetic construct
ANSSS

SEQ ID NO: 900 - protein, 5 aa, synthetic construct
ANSST

SEQ ID NO: 901 - protein, 5 aa, synthetic construct
ANSST

SEQ ID NO: 902 - protein, 5 aa, synthetic construct
ANSST

SEQ ID NO: 903 - protein, 5 aa, synthetic construct
ANSST

SEQ ID NO: 904 - protein, 5 aa, synthetic construct
ANSST

SEQ ID NO: 905 - protein, 5 aa, synthetic construct
ANSSV

SEQ ID NO: 906 - protein, 5 aa, synthetic construct
ANSSV

SEQ ID NO: 907 - protein, 5 aa, synthetic construct
ANSSV

SEQ ID NO: 908 - protein, 5 aa, synthetic construct
ANSSV

SEQ ID NO: 909 - protein, 5 aa, synthetic construct
ANSSV

SEQ ID NO: 910 - protein, 5 aa, synthetic construct
ANTSA

SEQ ID NO: 911 - protein, 5 aa, synthetic construct
ANTSA

SEQ ID NO: 912 - protein, 5 aa, synthetic construct
ANTSA

SEQ ID NO: 913 - protein, 5 aa, synthetic construct
ANTSA

SEQ ID NO: 914 - protein, 5 aa, synthetic construct
ANTSA

SEQ ID NO: 915 - protein, 5 aa, synthetic construct
ANTSA

SEQ ID NO: 916 - protein, 5 aa, synthetic construct
ANTSG

SEQ ID NO: 917 - protein, 5 aa, synthetic construct
ANTSG

SEQ ID NO: 918 - protein, 5 aa, synthetic construct
ANTSG

SEQ ID NO: 919 - protein, 5 aa, synthetic construct
ANTSG

SEQ ID NO: 920 - protein, 5 aa, synthetic construct
ANTSG

SEQ ID NO: 921 - protein, 5 aa, synthetic construct
ANTSG

SEQ ID NO: 922 - protein, 5 aa, synthetic construct
ANTSG

SEQ ID NO: 923 - protein, 5 aa, synthetic construct
ANTSM

SEQ ID NO: 924 - protein, 5 aa, synthetic construct
ANTSM

SEQ ID NO: 925 - protein, 5 aa, synthetic construct
ANTSM

SEQ ID NO: 926 - protein, 5 aa, synthetic construct
ANTSM

SEQ ID NO: 927 - protein, 5 aa, synthetic construct
ANTSS

SEQ ID NO: 928 - protein, 5 aa, synthetic construct
ANTSS

SEQ ID NO: 929 - protein, 5 aa, synthetic construct
ANTSS

SEQ ID NO: 930 - protein, 5 aa, synthetic construct
ANTST

SEQ ID NO: 931 - protein, 5 aa, synthetic construct
ANTST

SEQ ID NO: 932 - protein, 5 aa, synthetic construct
ANTST

SEQ ID NO: 933 - protein, 5 aa, synthetic construct
ANTST

SEQ ID NO: 934 - protein, 5 aa, synthetic construct
ANTSV

SEQ ID NO: 935 - protein, 5 aa, synthetic construct
ANTSV

SEQ ID NO: 936 - protein, 5 aa, synthetic construct
ANTSV

SEQ ID NO: 937 - protein, 5 aa, synthetic construct
ANTSV

SEQ ID NO: 938 - protein, 5 aa, synthetic construct
ANTSV

SEQ ID NO: 939 - protein, 5 aa, synthetic construct
ANYPH

SEQ ID NO: 940 - protein, 5 aa, synthetic construct
ANYSA

SEQ ID NO: 941 - protein, 5 aa, synthetic construct
ANYSA

SEQ ID NO: 942 - protein, 5 aa, synthetic construct
ANYSA

SEQ ID NO: 943 - protein, 5 aa, synthetic construct
ANYSA

SEQ ID NO: 944 - protein, 5 aa, synthetic construct
ANYSA

SEQ ID NO: 945 - protein, 5 aa, synthetic construct
ANYSA

SEQ ID NO: 946 - protein, 5 aa, synthetic construct
ANYSG

SEQ ID NO: 947 - protein, 5 aa, synthetic construct
ANYSG

SEQ ID NO: 948 - protein, 5 aa, synthetic construct
ANYSG

SEQ ID NO: 949 - protein, 5 aa, synthetic construct
ANYSG

SEQ ID NO: 950 - protein, 5 aa, synthetic construct
ANYSG

SEQ ID NO: 951 - protein, 5 aa, synthetic construct
ANYSG

SEQ ID NO: 952 - protein, 5 aa, synthetic construct
ANYSG

SEQ ID NO: 953 - protein, 5 aa, synthetic construct
ANYSM

SEQ ID NO: 954 - protein, 5 aa, synthetic construct
ANYSM

SEQ ID NO: 955 - protein, 5 aa, synthetic construct
ANYSM

SEQ ID NO: 956 - protein, 5 aa, synthetic construct
ANYSM

SEQ ID NO: 957 - protein, 5 aa, synthetic construct
ANYSM

SEQ ID NO: 958 - protein, 5 aa, synthetic construct
ANYSS

SEQ ID NO: 959 - protein, 5 aa, synthetic construct
ANYSS

SEQ ID NO: 960 - protein, 5 aa, synthetic construct
ANYSS

SEQ ID NO: 961 - protein, 5 aa, synthetic construct
ANYSS

SEQ ID NO: 962 - protein, 5 aa, synthetic construct
ANYSS

SEQ ID NO: 963 - protein, 5 aa, synthetic construct
ANYST

SEQ ID NO: 964 - protein, 5 aa, synthetic construct
ANYST

SEQ ID NO: 965 - protein, 5 aa, synthetic construct
ANYST

SEQ ID NO: 966 - protein, 5 aa, synthetic construct
ANYSV

SEQ ID NO: 967 - protein, 5 aa, synthetic construct
ANYSV

SEQ ID NO: 968 - protein, 5 aa, synthetic construct
ANYSV

SEQ ID NO: 969 - protein, 5 aa, synthetic construct
FNSGM

SEQ ID NO: 970 - protein, 5 aa, synthetic construct
GNSGM

SEQ ID NO: 971 - protein, 5 aa, synthetic construct
HNSGM

SEQ ID NO: 972 - protein, 5 aa, synthetic construct
LNASA

SEQ ID NO: 973 - protein, 5 aa, synthetic construct
LNASA

SEQ ID NO: 974 - protein, 5 aa, synthetic construct
LNASA

SEQ ID NO: 975 - protein, 5 aa, synthetic construct
LNASA

SEQ ID NO: 976 - protein, 5 aa, synthetic construct
LNASA

SEQ ID NO: 977 - protein, 5 aa, synthetic construct
LNASA

SEQ ID NO: 978 - protein, 5 aa, synthetic construct
LNASA

SEQ ID NO: 979 - protein, 5 aa, synthetic construct
LNASA

SEQ ID NO: 980 - protein, 5 aa, synthetic construct
LNASA

SEQ ID NO: 981 - protein, 5 aa, synthetic construct
LNASG

SEQ ID NO: 982 - protein, 5 aa, synthetic construct
LNASG

SEQ ID NO: 983 - protein, 5 aa, synthetic construct
LNASG

SEQ ID NO: 984 - protein, 5 aa, synthetic construct
LNASG

SEQ ID NO: 985 - protein, 5 aa, synthetic construct
LNASG

SEQ ID NO: 986 - protein, 5 aa, synthetic construct
LNASG

SEQ ID NO: 987 - protein, 5 aa, synthetic construct
LNASG

SEQ ID NO: 988 - protein, 5 aa, synthetic construct
LNASG

SEQ ID NO: 989 - protein, 5 aa, synthetic construct
LNASG

SEQ ID NO: 990 - protein, 5 aa, synthetic construct
LNASI

SEQ ID NO: 991 - protein, 5 aa, synthetic construct
LNASM

SEQ ID NO: 992 - protein, 5 aa, synthetic construct
LNASM

SEQ ID NO: 993 - protein, 5 aa, synthetic construct
LNASM

SEQ ID NO: 994 - protein, 5 aa, synthetic construct
LNASM

SEQ ID NO: 995 - protein, 5 aa, synthetic construct
LNASM

SEQ ID NO: 996 - protein, 5 aa, synthetic construct
LNASM

SEQ ID NO: 997 - protein, 5 aa, synthetic construct
LNASM

SEQ ID NO: 998 - protein, 5 aa, synthetic construct
LNASM

SEQ ID NO: 999 - protein, 5 aa, synthetic construct
LNASM

SEQ ID NO: 1000 - protein, 5 aa, synthetic construct
LNASS

SEQ ID NO: 1001 - protein, 5 aa, synthetic construct
LNASS

SEQ ID NO: 1002 - protein, 5 aa, synthetic construct
LNASS

SEQ ID NO: 1003 - protein, 5 aa, synthetic construct
LNASS

SEQ ID NO: 1004 - protein, 5 aa, synthetic construct
LNASS

SEQ ID NO: 1005 - protein, 5 aa, synthetic construct
LNASS

SEQ ID NO: 1006 - protein, 5 aa, synthetic construct
LNASS

SEQ ID NO: 1007 - protein, 5 aa, synthetic construct
LNAST

SEQ ID NO: 1008 - protein, 5 aa, synthetic construct
LNAST

SEQ ID NO: 1009 - protein, 5 aa, synthetic construct
LNAST

SEQ ID NO: 1010 - protein, 5 aa, synthetic construct
LNAST

SEQ ID NO: 1011 - protein, 5 aa, synthetic construct
LNAST

SEQ ID NO: 1012 - protein, 5 aa, synthetic construct
LNAST

SEQ ID NO: 1013 - protein, 5 aa, synthetic construct
LNAST

SEQ ID NO: 1014 - protein, 5 aa, synthetic construct
LNAST

SEQ ID NO: 1015 - protein, 5 aa, synthetic construct
LNASV

SEQ ID NO: 1016 - protein, 5 aa, synthetic construct
LNASV

SEQ ID NO: 1017 - protein, 5 aa, synthetic construct
LNASV

SEQ ID NO: 1018 - protein, 5 aa, synthetic construct
LNASV

SEQ ID NO: 1019 - protein, 5 aa, synthetic construct
LNASV

SEQ ID NO: 1020 - protein, 5 aa, synthetic construct
LNASV

SEQ ID NO: 1021 - protein, 5 aa, synthetic construct
LNASV

SEQ ID NO: 1022 - protein, 5 aa, synthetic construct
LNGNF

SEQ ID NO: 1023 - protein, 5 aa, synthetic construct
LNGNV

SEQ ID NO: 1024 - protein, 5 aa, synthetic construct
LNGSA

SEQ ID NO: 1025 - protein, 5 aa, synthetic construct
LNGSA

SEQ ID NO: 1026 - protein, 5 aa, synthetic construct
LNGSA

SEQ ID NO: 1027 - protein, 5 aa, synthetic construct
LNGSA

SEQ ID NO: 1028 - protein, 5 aa, synthetic construct
LNGSA

SEQ ID NO: 1029 - protein, 5 aa, synthetic construct
LNGSA

SEQ ID NO: 1030 - protein, 5 aa, synthetic construct
LNGSA

SEQ ID NO: 1031 - protein, 5 aa, synthetic construct
LNGSG

SEQ ID NO: 1032 - protein, 5 aa, synthetic construct
LNGSG

SEQ ID NO: 1033 - protein, 5 aa, synthetic construct
LNGSG

SEQ ID NO: 1034 - protein, 5 aa, synthetic construct
LNGSG

SEQ ID NO: 1035 - protein, 5 aa, synthetic construct
LNGSG

SEQ ID NO: 1036 - protein, 5 aa, synthetic construct
LNGSG

SEQ ID NO: 1037 - protein, 5 aa, synthetic construct
LNGSG

SEQ ID NO: 1038 - protein, 5 aa, synthetic construct
LNGSM

SEQ ID NO: 1039 - protein, 5 aa, synthetic construct
LNGSM

SEQ ID NO: 1040 - protein, 5 aa, synthetic construct
LNGSM

SEQ ID NO: 1041 - protein, 5 aa, synthetic construct
LNGSM

SEQ ID NO: 1042 - protein, 5 aa, synthetic construct
LNGSM

SEQ ID NO: 1043 - protein, 5 aa, synthetic construct
LNGSS

SEQ ID NO: 1044 - protein, 5 aa, synthetic construct
LNGSS

SEQ ID NO: 1045 - protein, 5 aa, synthetic construct
LNGSS

SEQ ID NO: 1046 - protein, 5 aa, synthetic construct
LNGSS

SEQ ID NO: 1047 - protein, 5 aa, synthetic construct
LNGST

SEQ ID NO: 1048 - protein, 5 aa, synthetic construct
LNGST

SEQ ID NO: 1049 - protein, 5 aa, synthetic construct
LNGST

SEQ ID NO: 1050 - protein, 5 aa, synthetic construct
LNGST

SEQ ID NO: 1051 - protein, 5 aa, synthetic construct
LNGST

SEQ ID NO: 1052 - protein, 5 aa, synthetic construct
LNGST

SEQ ID NO: 1053 - protein, 5 aa, synthetic construct
LNGST

SEQ ID NO: 1054 - protein, 5 aa, synthetic construct
LNGST

SEQ ID NO: 1055 - protein, 5 aa, synthetic construct
LNGST

SEQ ID NO: 1056 - protein, 5 aa, synthetic construct
LNGSV

SEQ ID NO: 1057 - protein, 5 aa, synthetic construct
LNGSV

SEQ ID NO: 1058 - protein, 5 aa, synthetic construct
LNGSV

SEQ ID NO: 1059 - protein, 5 aa, synthetic construct
LNGSV

SEQ ID NO: 1060 - protein, 5 aa, synthetic construct
LNGSV

SEQ ID NO: 1061 - protein, 5 aa, synthetic construct
LNGSV

SEQ ID NO: 1062 - protein, 5 aa, synthetic construct
LNSGM

SEQ ID NO: 1063 - protein, 5 aa, synthetic construct
LNSSA

SEQ ID NO: 1064 - protein, 5 aa, synthetic construct
LNSSA

SEQ ID NO: 1065 - protein, 5 aa, synthetic construct
LNSSA

SEQ ID NO: 1066 - protein, 5 aa, synthetic construct
LNSSA

SEQ ID NO: 1067 - protein, 5 aa, synthetic construct
LNSSA

SEQ ID NO: 1068 - protein, 5 aa, synthetic construct
LNSSA

SEQ ID NO: 1069 - protein, 5 aa, synthetic construct
LNSSA

SEQ ID NO: 1070 - protein, 5 aa, synthetic construct
LNSSA

SEQ ID NO: 1071 - protein, 5 aa, synthetic construct
LNSSA

SEQ ID NO: 1072 - protein, 5 aa, synthetic construct
LNSSG

SEQ ID NO: 1073 - protein, 5 aa, synthetic construct
LNSSG

SEQ ID NO: 1074 - protein, 5 aa, synthetic construct
LNSSG

SEQ ID NO: 1075 - protein, 5 aa, synthetic construct
LNSSG

SEQ ID NO: 1076 - protein, 5 aa, synthetic construct
LNSSG

SEQ ID NO: 1077 - protein, 5 aa, synthetic construct
LNSSG

SEQ ID NO: 1078 - protein, 5 aa, synthetic construct
LNSSG

SEQ ID NO: 1079 - protein, 5 aa, synthetic construct
LNSSG

SEQ ID NO: 1080 - protein, 5 aa, synthetic construct
LNSSG

SEQ ID NO: 1081 - protein, 5 aa, synthetic construct
LNSSM

SEQ ID NO: 1082 - protein, 5 aa, synthetic construct
LNSSM

SEQ ID NO: 1083 - protein, 5 aa, synthetic construct
LNSSM

SEQ ID NO: 1084 - protein, 5 aa, synthetic construct
LNSSM

SEQ ID NO: 1085 - protein, 5 aa, synthetic construct
LNSSM

SEQ ID NO: 1086 - protein, 5 aa, synthetic construct
LNSSM

SEQ ID NO: 1087 - protein, 5 aa, synthetic construct
LNSSM

SEQ ID NO: 1088 - protein, 5 aa, synthetic construct
LNSSM

SEQ ID NO: 1089 - protein, 5 aa, synthetic construct
LNSSS

SEQ ID NO: 1090 - protein, 5 aa, synthetic construct
LNSSS

SEQ ID NO: 1091 - protein, 5 aa, synthetic construct
LNSSS

SEQ ID NO: 1092 - protein, 5 aa, synthetic construct
LNSSS

SEQ ID NO: 1093 - protein, 5 aa, synthetic construct
LNSSS

SEQ ID NO: 1094 - protein, 5 aa, synthetic construct
LNSSS

SEQ ID NO: 1095 - protein, 5 aa, synthetic construct
LNSST

SEQ ID NO: 1096 - protein, 5 aa, synthetic construct
LNSST

SEQ ID NO: 1097 - protein, 5 aa, synthetic construct
LNSST

SEQ ID NO: 1098 - protein, 5 aa, synthetic construct
LNSST

SEQ ID NO: 1099 - protein, 5 aa, synthetic construct
LNSST

SEQ ID NO: 1100 - protein, 5 aa, synthetic construct
LNSST

SEQ ID NO: 1101 - protein, 5 aa, synthetic construct
LNSST

SEQ ID NO: 1102 - protein, 5 aa, synthetic construct
LNSSV

SEQ ID NO: 1103 - protein, 5 aa, synthetic construct
LNSSV

SEQ ID NO: 1104 - protein, 5 aa, synthetic construct
LNSSV

SEQ ID NO: 1105 - protein, 5 aa, synthetic construct
LNSSV

SEQ ID NO: 1106 - protein, 5 aa, synthetic construct
LNSSV

SEQ ID NO: 1107 - protein, 5 aa, synthetic construct
LNSSV

SEQ ID NO: 1108 - protein, 5 aa, synthetic construct
LNSSV

SEQ ID NO: 1109 - protein, 5 aa, synthetic construct
LNSSV

SEQ ID NO: 1110 - protein, 5 aa, synthetic construct
LNTSA

SEQ ID NO: 1111 - protein, 5 aa, synthetic construct
LNTSA

SEQ ID NO: 1112 - protein, 5 aa, synthetic construct
LNTSA

SEQ ID NO: 1113 - protein, 5 aa, synthetic construct
LNTSA

SEQ ID NO: 1114 - protein, 5 aa, synthetic construct
LNTSA

SEQ ID NO: 1115 - protein, 5 aa, synthetic construct
LNTSA

SEQ ID NO: 1116 - protein, 5 aa, synthetic construct
LNTSA

SEQ ID NO: 1117 - protein, 5 aa, synthetic construct
LNTSA

SEQ ID NO: 1118 - protein, 5 aa, synthetic construct
LNTSA

SEQ ID NO: 1119 - protein, 5 aa, synthetic construct
LNTSG

SEQ ID NO: 1120 - protein, 5 aa, synthetic construct
LNTSG

SEQ ID NO: 1121 - protein, 5 aa, synthetic construct
LNTSG

SEQ ID NO: 1122 - protein, 5 aa, synthetic construct
LNTSG

SEQ ID NO: 1123 - protein, 5 aa, synthetic construct
LNTSG

SEQ ID NO: 1124 - protein, 5 aa, synthetic construct
LNTSG

SEQ ID NO: 1125 - protein, 5 aa, synthetic construct
LNTSG

SEQ ID NO: 1126 - protein, 5 aa, synthetic construct
LNTSG

SEQ ID NO: 1127 - protein, 5 aa, synthetic construct
LNTSG

SEQ ID NO: 1128 - protein, 5 aa, synthetic construct
LNTSM

SEQ ID NO: 1129 - protein, 5 aa, synthetic construct
LNTSM

SEQ ID NO: 1130 - protein, 5 aa, synthetic construct
LNTSM

SEQ ID NO: 1131 - protein, 5 aa, synthetic construct
LNTSM

SEQ ID NO: 1132 - protein, 5 aa, synthetic construct
LNTSM

SEQ ID NO: 1133 - protein, 5 aa, synthetic construct
LNTSM

SEQ ID NO: 1134 - protein, 5 aa, synthetic construct
LNTSM

SEQ ID NO: 1135 - protein, 5 aa, synthetic construct
LNTSM

SEQ ID NO: 1136 - protein, 5 aa, synthetic construct
LNTSS

SEQ ID NO: 1137 - protein, 5 aa, synthetic construct
LNTSS

SEQ ID NO: 1138 - protein, 5 aa, synthetic construct
LNTSS

SEQ ID NO: 1139 - protein, 5 aa, synthetic construct
LNTSS

SEQ ID NO: 1140 - protein, 5 aa, synthetic construct
LNTSS

SEQ ID NO: 1141 - protein, 5 aa, synthetic construct
LNTST

SEQ ID NO: 1142 - protein, 5 aa, synthetic construct
LNTST

SEQ ID NO: 1143 - protein, 5 aa, synthetic construct
LNTST

SEQ ID NO: 1144 - protein, 5 aa, synthetic construct
LNTST

SEQ ID NO: 1145 - protein, 5 aa, synthetic construct
LNTST

SEQ ID NO: 1146 - protein, 5 aa, synthetic construct
LNTST

SEQ ID NO: 1147 - protein, 5 aa, synthetic construct
LNTST

SEQ ID NO: 1148 - protein, 5 aa, synthetic construct
LNTSV

SEQ ID NO: 1149 - protein, 5 aa, synthetic construct
LNTSV

SEQ ID NO: 1150 - protein, 5 aa, synthetic construct
LNTSV

SEQ ID NO: 1151 - protein, 5 aa, synthetic construct
LNTSV

SEQ ID NO: 1152 - protein, 5 aa, synthetic construct
LNTSV

SEQ ID NO: 1153 - protein, 5 aa, synthetic construct
LNTSV

SEQ ID NO: 1154 - protein, 5 aa, synthetic construct
LNTSV

SEQ ID NO: 1155 - protein, 5 aa, synthetic construct
LNYPH

SEQ ID NO: 1156 - protein, 5 aa, synthetic construct
LNYSA

SEQ ID NO: 1157 - protein, 5 aa, synthetic construct
LNYSA

SEQ ID NO: 1158 - protein, 5 aa, synthetic construct
LNYSA

SEQ ID NO: 1159 - protein, 5 aa, synthetic construct
LNYSA

SEQ ID NO: 1160 - protein, 5 aa, synthetic construct
LNYSA

SEQ ID NO: 1161 - protein, 5 aa, synthetic construct
LNYSG

SEQ ID NO: 1162 - protein, 5 aa, synthetic construct
LNYSG

SEQ ID NO: 1163 - protein, 5 aa, synthetic construct
LNYSG

SEQ ID NO: 1164 - protein, 5 aa, synthetic construct
LNYSG

SEQ ID NO: 1165 - protein, 5 aa, synthetic construct
LNYSG

SEQ ID NO: 1166 - protein, 5 aa, synthetic construct
LNYSG

SEQ ID NO: 1167 - protein, 5 aa, synthetic construct
LNYSG

SEQ ID NO: 1168 - protein, 5 aa, synthetic construct
LNYSM

SEQ ID NO: 1169 - protein, 5 aa, synthetic construct
LNYSM

SEQ ID NO: 1170 - protein, 5 aa, synthetic construct
LNYSS

SEQ ID NO: 1171 - protein, 5 aa, synthetic construct
LNYSS

SEQ ID NO: 1172 - protein, 5 aa, synthetic construct
LNYSS

SEQ ID NO: 1173 - protein, 5 aa, synthetic construct
LNYSS

SEQ ID NO: 1174 - protein, 5 aa, synthetic construct
LNYSS

SEQ ID NO: 1175 - protein, 5 aa, synthetic construct
LNYST

SEQ ID NO: 1176 - protein, 5 aa, synthetic construct
LNYST

SEQ ID NO: 1177 - protein, 5 aa, synthetic construct
LNYST

SEQ ID NO: 1178 - protein, 5 aa, synthetic construct
LNYST

SEQ ID NO: 1179 - protein, 5 aa, synthetic construct
LNYST

SEQ ID NO: 1180 - protein, 5 aa, synthetic construct
LNYST

SEQ ID NO: 1181 - protein, 5 aa, synthetic construct
LNYSV

SEQ ID NO: 1182 - protein, 5 aa, synthetic construct
LNYSV

SEQ ID NO: 1183 - protein, 5 aa, synthetic construct
MNASA

SEQ ID NO: 1184 - protein, 5 aa, synthetic construct
MNASA

SEQ ID NO: 1185 - protein, 5 aa, synthetic construct
MNASA

SEQ ID NO: 1186 - protein, 5 aa, synthetic construct
MNASA

SEQ ID NO: 1187 - protein, 5 aa, synthetic construct
MNASA

SEQ ID NO: 1188 - protein, 5 aa, synthetic construct
MNASA

SEQ ID NO: 1189 - protein, 5 aa, synthetic construct
MNASA

SEQ ID NO: 1190 - protein, 5 aa, synthetic construct
MNASG

SEQ ID NO: 1191 - protein, 5 aa, synthetic construct
MNASG

SEQ ID NO: 1192 - protein, 5 aa, synthetic construct
MNASG

SEQ ID NO: 1193 - protein, 5 aa, synthetic construct
MNASG

SEQ ID NO: 1194 - protein, 5 aa, synthetic construct
MNASG

SEQ ID NO: 1195 - protein, 5 aa, synthetic construct
MNASG

SEQ ID NO: 1196 - protein, 5 aa, synthetic construct
MNASG

SEQ ID NO: 1197 - protein, 5 aa, synthetic construct
MNASI

SEQ ID NO: 1198 - protein, 5 aa, synthetic construct
MNASM

SEQ ID NO: 1199 - protein, 5 aa, synthetic construct
MNASM

SEQ ID NO: 1200 - protein, 5 aa, synthetic construct
MNASM

SEQ ID NO: 1201 - protein, 5 aa, synthetic construct
MNASM

SEQ ID NO: 1202 - protein, 5 aa, synthetic construct
MNASM

SEQ ID NO: 1203 - protein, 5 aa, synthetic construct
MNASS

SEQ ID NO: 1204 - protein, 5 aa, synthetic construct
MNAST

SEQ ID NO: 1205 - protein, 5 aa, synthetic construct
MNAST

SEQ ID NO: 1206 - protein, 5 aa, synthetic construct
MNAST

SEQ ID NO: 1207 - protein, 5 aa, synthetic construct
MNAST

SEQ ID NO: 1208 - protein, 5 aa, synthetic construct
MNAST

SEQ ID NO: 1209 - protein, 5 aa, synthetic construct
MNAST

SEQ ID NO: 1210 - protein, 5 aa, synthetic construct
MNAST

SEQ ID NO: 1211 - protein, 5 aa, synthetic construct
MNAST

SEQ ID NO: 1212 - protein, 5 aa, synthetic construct
MNASV

SEQ ID NO: 1213 - protein, 5 aa, synthetic construct
MNASV

SEQ ID NO: 1214 - protein, 5 aa, synthetic construct
MNASV

SEQ ID NO: 1215 - protein, 5 aa, synthetic construct
MNASV

SEQ ID NO: 1216 - protein, 5 aa, synthetic construct
MNASV

SEQ ID NO: 1217 - protein, 5 aa, synthetic construct
MNASV

SEQ ID NO: 1218 - protein, 5 aa, synthetic construct
MNGNF

SEQ ID NO: 1219 - protein, 5 aa, synthetic construct
MNGSA

SEQ ID NO: 1220 - protein, 5 aa, synthetic construct
MNGSA

SEQ ID NO: 1221 - protein, 5 aa, synthetic construct
MNGSA

SEQ ID NO: 1222 - protein, 5 aa, synthetic construct
MNGSA

SEQ ID NO: 1223 - protein, 5 aa, synthetic construct
MNGSA

SEQ ID NO: 1224 - protein, 5 aa, synthetic construct
MNGSG

SEQ ID NO: 1225 - protein, 5 aa, synthetic construct
MNGSG

SEQ ID NO: 1226 - protein, 5 aa, synthetic construct
MNGSG

SEQ ID NO: 1227 - protein, 5 aa, synthetic construct
MNGSG

SEQ ID NO: 1228 - protein, 5 aa, synthetic construct
MNGSG

SEQ ID NO: 1229 - protein, 5 aa, synthetic construct
MNGSG

SEQ ID NO: 1230 - protein, 5 aa, synthetic construct
MNGSG

SEQ ID NO: 1231 - protein, 5 aa, synthetic construct
MNGSG

SEQ ID NO: 1232 - protein, 5 aa, synthetic construct
MNGSM

SEQ ID NO: 1233 - protein, 5 aa, synthetic construct
MNGSM

SEQ ID NO: 1234 - protein, 5 aa, synthetic construct
MNGSM

SEQ ID NO: 1235 - protein, 5 aa, synthetic construct
MNGSS

SEQ ID NO: 1236 - protein, 5 aa, synthetic construct
MNGST

SEQ ID NO: 1237 - protein, 5 aa, synthetic construct
MNGST

SEQ ID NO: 1238 - protein, 5 aa, synthetic construct
MNGST

SEQ ID NO: 1239 - protein, 5 aa, synthetic construct
MNGST

SEQ ID NO: 1240 - protein, 5 aa, synthetic construct
MNGST

SEQ ID NO: 1241 - protein, 5 aa, synthetic construct
MNGST

SEQ ID NO: 1242 - protein, 5 aa, synthetic construct
MNGSV

SEQ ID NO: 1243 - protein, 5 aa, synthetic construct
MNGSV

SEQ ID NO: 1244 - protein, 5 aa, synthetic construct
MNGSV

SEQ ID NO: 1245 - protein, 5 aa, synthetic construct
MNSGM

SEQ ID NO: 1246 - protein, 5 aa, synthetic construct
MNSSA

SEQ ID NO: 1247 - protein, 5 aa, synthetic construct
MNSSA

SEQ ID NO: 1248 - protein, 5 aa, synthetic construct
MNSSA

SEQ ID NO: 1249 - protein, 5 aa, synthetic construct
MNSSA

SEQ ID NO: 1250 - protein, 5 aa, synthetic construct
MNSSA

SEQ ID NO: 1251 - protein, 5 aa, synthetic construct
MNSSA

SEQ ID NO: 1252 - protein, 5 aa, synthetic construct
MNSSA

SEQ ID NO: 1253 - protein, 5 aa, synthetic construct
MNSSG

SEQ ID NO: 1254 - protein, 5 aa, synthetic construct
MNSSG

SEQ ID NO: 1255 - protein, 5 aa, synthetic construct
MNSSG

SEQ ID NO: 1256 - protein, 5 aa, synthetic construct
MNSSG

SEQ ID NO: 1257 - protein, 5 aa, synthetic construct
MNSSG

SEQ ID NO: 1258 - protein, 5 aa, synthetic construct
MNSSG

SEQ ID NO: 1259 - protein, 5 aa, synthetic construct
MNSSG

SEQ ID NO: 1260 - protein, 5 aa, synthetic construct
MNSSG

SEQ ID NO: 1261 - protein, 5 aa, synthetic construct
MNSSM

SEQ ID NO: 1262 - protein, 5 aa, synthetic construct
MNSSM

SEQ ID NO: 1263 - protein, 5 aa, synthetic construct
MNSSM

SEQ ID NO: 1264 - protein, 5 aa, synthetic construct
MNSSM

SEQ ID NO: 1265 - protein, 5 aa, synthetic construct
MNSSM

SEQ ID NO: 1266 - protein, 5 aa, synthetic construct
MNSSM

SEQ ID NO: 1267 - protein, 5 aa, synthetic construct
MNSSM

SEQ ID NO: 1268 - protein, 5 aa, synthetic construct
MNSSS

SEQ ID NO: 1269 - protein, 5 aa, synthetic construct
MNSST

SEQ ID NO: 1270 - protein, 5 aa, synthetic construct
MNSST

SEQ ID NO: 1271 - protein, 5 aa, synthetic construct
MNSST

SEQ ID NO: 1272 - protein, 5 aa, synthetic construct
MNSST

SEQ ID NO: 1273 - protein, 5 aa, synthetic construct
MNSST

SEQ ID NO: 1274 - protein, 5 aa, synthetic construct
MNSSV

SEQ ID NO: 1275 - protein, 5 aa, synthetic construct
MNSSV

SEQ ID NO: 1276 - protein, 5 aa, synthetic construct
MNSSV

SEQ ID NO: 1277 - protein, 5 aa, synthetic construct
MNSSV

SEQ ID NO: 1278 - protein, 5 aa, synthetic construct
MNSSV

SEQ ID NO: 1279 - protein, 5 aa, synthetic construct
MNTSA

SEQ ID NO: 1280 - protein, 5 aa, synthetic construct
MNTSG

SEQ ID NO: 1281 - protein, 5 aa, synthetic construct
MNTSG

SEQ ID NO: 1282 - protein, 5 aa, synthetic construct
MNTSG

SEQ ID NO: 1283 - protein, 5 aa, synthetic construct
MNTSM

SEQ ID NO: 1284 - protein, 5 aa, synthetic construct
MNTST

SEQ ID NO: 1285 - protein, 5 aa, synthetic construct
MNYPH

SEQ ID NO: 1286 - protein, 5 aa, synthetic construct
MNYSA

SEQ ID NO: 1287 - protein, 5 aa, synthetic construct
MNYSA

SEQ ID NO: 1288 - protein, 5 aa, synthetic construct
MNYSA

SEQ ID NO: 1289 - protein, 5 aa, synthetic construct
MNYSA

SEQ ID NO: 1290 - protein, 5 aa, synthetic construct
MNYSG

SEQ ID NO: 1291 - protein, 5 aa, synthetic construct
MNYSG

SEQ ID NO: 1292 - protein, 5 aa, synthetic construct
MNYSG

SEQ ID NO: 1293 - protein, 5 aa, synthetic construct
MNYSG

SEQ ID NO: 1294 - protein, 5 aa, synthetic construct
MNYSG

SEQ ID NO: 1295 - protein, 5 aa, synthetic construct
MNYSS

SEQ ID NO: 1296 - protein, 5 aa, synthetic construct
MNYST

SEQ ID NO: 1297 - protein, 5 aa, synthetic construct
MNYST

SEQ ID NO: 1298 - protein, 5 aa, synthetic construct
MNYST

SEQ ID NO: 1299 - protein, 5 aa, synthetic construct
MNYST

SEQ ID NO: 1300 - protein, 5 aa, synthetic construct
NNSGM

SEQ ID NO: 1301 - protein, 5 aa, synthetic construct
QNSGM

SEQ ID NO: 1302 - protein, 5 aa, synthetic construct
SNASA

SEQ ID NO: 1303 - protein, 5 aa, synthetic construct
SNASA

SEQ ID NO: 1304 - protein, 5 aa, synthetic construct
SNASA

SEQ ID NO: 1305 - protein, 5 aa, synthetic construct
SNASA

SEQ ID NO: 1306 - protein, 5 aa, synthetic construct
SNASA

SEQ ID NO: 1307 - protein, 5 aa, synthetic construct
SNASA

SEQ ID NO: 1308 - protein, 5 aa, synthetic construct
SNASA

SEQ ID NO: 1309 - protein, 5 aa, synthetic construct
SNASA

SEQ ID NO: 1310 - protein, 5 aa, synthetic construct
SNASA

SEQ ID NO: 1311 - protein, 5 aa, synthetic construct
SNASG

SEQ ID NO: 1312 - protein, 5 aa, synthetic construct
SNASG

SEQ ID NO: 1313 - protein, 5 aa, synthetic construct
SNASG

SEQ ID NO: 1314 - protein, 5 aa, synthetic construct
SNASG

SEQ ID NO: 1315 - protein, 5 aa, synthetic construct
SNASG

SEQ ID NO: 1316 - protein, 5 aa, synthetic construct
SNASG

SEQ ID NO: 1317 - protein, 5 aa, synthetic construct
SNASG

SEQ ID NO: 1318 - protein, 5 aa, synthetic construct
SNASG

SEQ ID NO: 1319 - protein, 5 aa, synthetic construct
SNASG

SEQ ID NO: 1320 - protein, 5 aa, synthetic construct
SNASI

SEQ ID NO: 1321 - protein, 5 aa, synthetic construct
SNASM

SEQ ID NO: 1322 - protein, 5 aa, synthetic construct
SNASM

SEQ ID NO: 1323 - protein, 5 aa, synthetic construct
SNASM

SEQ ID NO: 1324 - protein, 5 aa, synthetic construct
SNASM

SEQ ID NO: 1325 - protein, 5 aa, synthetic construct
SNASM

SEQ ID NO: 1326 - protein, 5 aa, synthetic construct
SNASM

SEQ ID NO: 1327 - protein, 5 aa, synthetic construct
SNASS

SEQ ID NO: 1328 - protein, 5 aa, synthetic construct
SNASS

SEQ ID NO: 1329 - protein, 5 aa, synthetic construct
SNASS

SEQ ID NO: 1330 - protein, 5 aa, synthetic construct
SNASS

SEQ ID NO: 1331 - protein, 5 aa, synthetic construct
SNASS

SEQ ID NO: 1332 - protein, 5 aa, synthetic construct
SNASS

SEQ ID NO: 1333 - protein, 5 aa, synthetic construct
SNASS

SEQ ID NO: 1334 - protein, 5 aa, synthetic construct
SNASS

SEQ ID NO: 1335 - protein, 5 aa, synthetic construct
SNAST

SEQ ID NO: 1336 - protein, 5 aa, synthetic construct
SNAST

SEQ ID NO: 1337 - protein, 5 aa, synthetic construct
SNAST

SEQ ID NO: 1338 - protein, 5 aa, synthetic construct
SNAST

SEQ ID NO: 1339 - protein, 5 aa, synthetic construct
SNAST

SEQ ID NO: 1340 - protein, 5 aa, synthetic construct
SNAST

SEQ ID NO: 1341 - protein, 5 aa, synthetic construct
SNAST

SEQ ID NO: 1342 - protein, 5 aa, synthetic construct
SNAST

SEQ ID NO: 1343 - protein, 5 aa, synthetic construct
SNAST

SEQ ID NO: 1344 - protein, 5 aa, synthetic construct
SNASV

SEQ ID NO: 1345 - protein, 5 aa, synthetic construct
SNASV

SEQ ID NO: 1346 - protein, 5 aa, synthetic construct
SNASV

SEQ ID NO: 1347 - protein, 5 aa, synthetic construct
SNASV

SEQ ID NO: 1348 - protein, 5 aa, synthetic construct
SNASV

SEQ ID NO: 1349 - protein, 5 aa, synthetic construct
SNASV

SEQ ID NO: 1350 - protein, 5 aa, synthetic construct
SNASV

SEQ ID NO: 1351 - protein, 5 aa, synthetic construct
SNASV

SEQ ID NO: 1352 - protein, 5 aa, synthetic construct
SNGNF

SEQ ID NO: 1353 - protein, 5 aa, synthetic construct
SNGNV

SEQ ID NO: 1354 - protein, 5 aa, synthetic construct
SNGSA

SEQ ID NO: 1355 - protein, 5 aa, synthetic construct
SNGSA

SEQ ID NO: 1356 - protein, 5 aa, synthetic construct
SNGSA

SEQ ID NO: 1357 - protein, 5 aa, synthetic construct
SNGSA

SEQ ID NO: 1358 - protein, 5 aa, synthetic construct
SNGSG

SEQ ID NO: 1359 - protein, 5 aa, synthetic construct
SNGSG

SEQ ID NO: 1360 - protein, 5 aa, synthetic construct
SNGSG

SEQ ID NO: 1361 - protein, 5 aa, synthetic construct
SNGSG

SEQ ID NO: 1362 - protein, 5 aa, synthetic construct
SNGSG

SEQ ID NO: 1363 - protein, 5 aa, synthetic construct
SNGSG

SEQ ID NO: 1364 - protein, 5 aa, synthetic construct
SNGSG

SEQ ID NO: 1365 - protein, 5 aa, synthetic construct
SNGSG

SEQ ID NO: 1366 - protein, 5 aa, synthetic construct
SNGSM

SEQ ID NO: 1367 - protein, 5 aa, synthetic construct
SNGSM

SEQ ID NO: 1368 - protein, 5 aa, synthetic construct
SNGSM

SEQ ID NO: 1369 - protein, 5 aa, synthetic construct
SNGSM

SEQ ID NO: 1370 - protein, 5 aa, synthetic construct
SNGSM

SEQ ID NO: 1371 - protein, 5 aa, synthetic construct
SNGSS

SEQ ID NO: 1372 - protein, 5 aa, synthetic construct
SNGSS

SEQ ID NO: 1373 - protein, 5 aa, synthetic construct
SNGST

SEQ ID NO: 1374 - protein, 5 aa, synthetic construct
SNGST

SEQ ID NO: 1375 - protein, 5 aa, synthetic construct
SNGST

SEQ ID NO: 1376 - protein, 5 aa, synthetic construct
SNGST

SEQ ID NO: 1377 - protein, 5 aa, synthetic construct
SNGST

SEQ ID NO: 1378 - protein, 5 aa, synthetic construct
SNGST

SEQ ID NO: 1379 - protein, 5 aa, synthetic construct
SNGST

SEQ ID NO: 1380 - protein, 5 aa, synthetic construct
SNGSV

SEQ ID NO: 1381 - protein, 5 aa, synthetic construct
SNGSV

SEQ ID NO: 1382 - protein, 5 aa, synthetic construct
SNGSV

SEQ ID NO: 1383 - protein, 5 aa, synthetic construct
SNGSV

SEQ ID NO: 1384 - protein, 5 aa, synthetic construct
SNSGM

SEQ ID NO: 1385 - protein, 5 aa, synthetic construct
SNSSA

SEQ ID NO: 1386 - protein, 5 aa, synthetic construct
SNSSA

SEQ ID NO: 1387 - protein, 5 aa, synthetic construct
SNSSA

SEQ ID NO: 1388 - protein, 5 aa, synthetic construct
SNSSA

SEQ ID NO: 1389 - protein, 5 aa, synthetic construct
SNSSA

SEQ ID NO: 1390 - protein, 5 aa, synthetic construct
SNSSA

SEQ ID NO: 1391 - protein, 5 aa, synthetic construct
SNSSA

SEQ ID NO: 1392 - protein, 5 aa, synthetic construct
SNSSA

SEQ ID NO: 1393 - protein, 5 aa, synthetic construct
SNSSG

SEQ ID NO: 1394 - protein, 5 aa, synthetic construct
SNSSG

SEQ ID NO: 1395 - protein, 5 aa, synthetic construct
SNSSG

SEQ ID NO: 1396 - protein, 5 aa, synthetic construct
SNSSG

SEQ ID NO: 1397 - protein, 5 aa, synthetic construct
SNSSG

SEQ ID NO: 1398 - protein, 5 aa, synthetic construct
SNSSG

SEQ ID NO: 1399 - protein, 5 aa, synthetic construct
SNSSG

SEQ ID NO: 1400 - protein, 5 aa, synthetic construct
SNSSG

SEQ ID NO: 1401 - protein, 5 aa, synthetic construct
SNSSM

SEQ ID NO: 1402 - protein, 5 aa, synthetic construct
SNSSM

SEQ ID NO: 1403 - protein, 5 aa, synthetic construct
SNSSM

SEQ ID NO: 1404 - protein, 5 aa, synthetic construct
SNSSM

SEQ ID NO: 1405 - protein, 5 aa, synthetic construct
SNSSM

SEQ ID NO: 1406 - protein, 5 aa, synthetic construct
SNSSM

SEQ ID NO: 1407 - protein, 5 aa, synthetic construct
SNSSM

SEQ ID NO: 1408 - protein, 5 aa, synthetic construct
SNSSS

SEQ ID NO: 1409 - protein, 5 aa, synthetic construct
SNSSS

SEQ ID NO: 1410 - protein, 5 aa, synthetic construct
SNSSS

SEQ ID NO: 1411 - protein, 5 aa, synthetic construct
SNSSS

SEQ ID NO: 1412 - protein, 5 aa, synthetic construct
SNSSS

SEQ ID NO: 1413 - protein, 5 aa, synthetic construct
SNSST

SEQ ID NO: 1414 - protein, 5 aa, synthetic construct
SNSST

SEQ ID NO: 1415 - protein, 5 aa, synthetic construct
SNSST

SEQ ID NO: 1416 - protein, 5 aa, synthetic construct
SNSST

SEQ ID NO: 1417 - protein, 5 aa, synthetic construct
SNSST

SEQ ID NO: 1418 - protein, 5 aa, synthetic construct
SNSST

SEQ ID NO: 1419 - protein, 5 aa, synthetic construct
SNSST

SEQ ID NO: 1420 - protein, 5 aa, synthetic construct
SNSSV

SEQ ID NO: 1421 - protein, 5 aa, synthetic construct
SNSSV

SEQ ID NO: 1422 - protein, 5 aa, synthetic construct
SNSSV

SEQ ID NO: 1423 - protein, 5 aa, synthetic construct
SNTSA

SEQ ID NO: 1424 - protein, 5 aa, synthetic construct
SNTSA

SEQ ID NO: 1425 - protein, 5 aa, synthetic construct
SNTSA

SEQ ID NO: 1426 - protein, 5 aa, synthetic construct
SNTSA

SEQ ID NO: 1427 - protein, 5 aa, synthetic construct
SNTSA

SEQ ID NO: 1428 - protein, 5 aa, synthetic construct
SNTSA

SEQ ID NO: 1429 - protein, 5 aa, synthetic construct
SNTSA

SEQ ID NO: 1430 - protein, 5 aa, synthetic construct
SNTSG

SEQ ID NO: 1431 - protein, 5 aa, synthetic construct
SNTSG

SEQ ID NO: 1432 - protein, 5 aa, synthetic construct
SNTSG

SEQ ID NO: 1433 - protein, 5 aa, synthetic construct
SNTSG

SEQ ID NO: 1434 - protein, 5 aa, synthetic construct
SNTSG

SEQ ID NO: 1435 - protein, 5 aa, synthetic construct
SNTSG

SEQ ID NO: 1436 - protein, 5 aa, synthetic construct
SNTSG

SEQ ID NO: 1437 - protein, 5 aa, synthetic construct
SNTSG

SEQ ID NO: 1438 - protein, 5 aa, synthetic construct
SNTSM

SEQ ID NO: 1439 - protein, 5 aa, synthetic construct
SNTSM

SEQ ID NO: 1440 - protein, 5 aa, synthetic construct
SNTSM

SEQ ID NO: 1441 - protein, 5 aa, synthetic construct
SNTSM

SEQ ID NO: 1442 - protein, 5 aa, synthetic construct
SNTSS

SEQ ID NO: 1443 - protein, 5 aa, synthetic construct
SNTST

SEQ ID NO: 1444 - protein, 5 aa, synthetic construct
SNTST

SEQ ID NO: 1445 - protein, 5 aa, synthetic construct
SNTST

SEQ ID NO: 1446 - protein, 5 aa, synthetic construct
SNTSV

SEQ ID NO: 1447 - protein, 5 aa, synthetic construct
SNTSV

SEQ ID NO: 1448 - protein, 5 aa, synthetic construct
SNTSV

SEQ ID NO: 1449 - protein, 5 aa, synthetic construct
SNTSV

SEQ ID NO: 1450 - protein, 5 aa, synthetic construct
SNYPH

SEQ ID NO: 1451 - protein, 5 aa, synthetic construct
SNYSA

SEQ ID NO: 1452 - protein, 5 aa, synthetic construct
SNYSA

SEQ ID NO: 1453 - protein, 5 aa, synthetic construct
SNYSA

SEQ ID NO: 1454 - protein, 5 aa, synthetic construct
SNYSA

SEQ ID NO: 1455 - protein, 5 aa, synthetic construct
SNYSA

SEQ ID NO: 1456 - protein, 5 aa, synthetic construct
SNYSA

SEQ ID NO: 1457 - protein, 5 aa, synthetic construct
SNYSA

SEQ ID NO: 1458 - protein, 5 aa, synthetic construct
SNYSG

SEQ ID NO: 1459 - protein, 5 aa, synthetic construct
SNYSG

SEQ ID NO: 1460 - protein, 5 aa, synthetic construct
SNYSG

SEQ ID NO: 1461 - protein, 5 aa, synthetic construct
SNYSG

SEQ ID NO: 1462 - protein, 5 aa, synthetic construct
SNYSG

SEQ ID NO: 1463 - protein, 5 aa, synthetic construct
SNYSM

SEQ ID NO: 1464 - protein, 5 aa, synthetic construct
SNYSM

SEQ ID NO: 1465 - protein, 5 aa, synthetic construct
SNYSM

SEQ ID NO: 1466 - protein, 5 aa, synthetic construct
SNYSM

SEQ ID NO: 1467 - protein, 5 aa, synthetic construct
SNYSM

SEQ ID NO: 1468 - protein, 5 aa, synthetic construct
SNYSS

SEQ ID NO: 1469 - protein, 5 aa, synthetic construct
SNYSS

SEQ ID NO: 1470 - protein, 5 aa, synthetic construct
SNYSS

SEQ ID NO: 1471 - protein, 5 aa, synthetic construct
SNYSS

SEQ ID NO: 1472 - protein, 5 aa, synthetic construct
SNYST

SEQ ID NO: 1473 - protein, 5 aa, synthetic construct
SNYST

SEQ ID NO: 1474 - protein, 5 aa, synthetic construct
SNYST

SEQ ID NO: 1475 - protein, 5 aa, synthetic construct
SNYST

SEQ ID NO: 1476 - protein, 5 aa, synthetic construct
SNYST

SEQ ID NO: 1477 - protein, 5 aa, synthetic construct
SNYST

SEQ ID NO: 1478 - protein, 5 aa, synthetic construct
SNYSV

SEQ ID NO: 1479 - protein, 5 aa, synthetic construct
SNYSV

SEQ ID NO: 1480 - protein, 5 aa, synthetic construct
SNYSV

SEQ ID NO: 1481 - protein, 5 aa, synthetic construct
TNSGM

SEQ ID NO: 1482 - protein, 5 aa, synthetic construct
VNASA

SEQ ID NO: 1483 - protein, 5 aa, synthetic construct
VNASA

SEQ ID NO: 1484 - protein, 5 aa, synthetic construct
VNASA

SEQ ID NO: 1485 - protein, 5 aa, synthetic construct
VNASA

SEQ ID NO: 1486 - protein, 5 aa, synthetic construct
VNASA

SEQ ID NO: 1487 - protein, 5 aa, synthetic construct
VNASA

SEQ ID NO: 1488 - protein, 5 aa, synthetic construct
VNASG

SEQ ID NO: 1489 - protein, 5 aa, synthetic construct
VNASG

SEQ ID NO: 1490 - protein, 5 aa, synthetic construct
VNASG

SEQ ID NO: 1491 - protein, 5 aa, synthetic construct
VNASG

SEQ ID NO: 1492 - protein, 5 aa, synthetic construct
VNASG

SEQ ID NO: 1493 - protein, 5 aa, synthetic construct
VNASG

SEQ ID NO: 1494 - protein, 5 aa, synthetic construct
VNASG

SEQ ID NO: 1495 - protein, 5 aa, synthetic construct
VNASM

SEQ ID NO: 1496 - protein, 5 aa, synthetic construct
VNASM

SEQ ID NO: 1497 - protein, 5 aa, synthetic construct
VNASM

SEQ ID NO: 1498 - protein, 5 aa, synthetic construct
VNASS

SEQ ID NO: 1499 - protein, 5 aa, synthetic construct
VNASS

SEQ ID NO: 1500 - protein, 5 aa, synthetic construct
VNASS

SEQ ID NO: 1501 - protein, 5 aa, synthetic construct
VNAST

SEQ ID NO: 1502 - protein, 5 aa, synthetic construct
VNAST

SEQ ID NO: 1503 - protein, 5 aa, synthetic construct
VNAST

SEQ ID NO: 1504 - protein, 5 aa, synthetic construct
VNAST

SEQ ID NO: 1505 - protein, 5 aa, synthetic construct
VNAST

SEQ ID NO: 1506 - protein, 5 aa, synthetic construct
VNAST

SEQ ID NO: 1507 - protein, 5 aa, synthetic construct
VNAST

SEQ ID NO: 1508 - protein, 5 aa, synthetic construct
VNASV

SEQ ID NO: 1509 - protein, 5 aa, synthetic construct
VNASV

SEQ ID NO: 1510 - protein, 5 aa, synthetic construct
VNASV

SEQ ID NO: 1511 - protein, 5 aa, synthetic construct
VNASV

SEQ ID NO: 1512 - protein, 5 aa, synthetic construct
VNASV

SEQ ID NO: 1513 - protein, 5 aa, synthetic construct
VNGNF

SEQ ID NO: 1514 - protein, 5 aa, synthetic construct
VNGNV

SEQ ID NO: 1515 - protein, 5 aa, synthetic construct
VNGSA

SEQ ID NO: 1516 - protein, 5 aa, synthetic construct
VNGSA

SEQ ID NO: 1517 - protein, 5 aa, synthetic construct
VNGSA

SEQ ID NO: 1518 - protein, 5 aa, synthetic construct
VNGSA

SEQ ID NO: 1519 - protein, 5 aa, synthetic construct
VNGSA

SEQ ID NO: 1520 - protein, 5 aa, synthetic construct
VNGSA

SEQ ID NO: 1521 - protein, 5 aa, synthetic construct
VNGSA

SEQ ID NO: 1522 - protein, 5 aa, synthetic construct
VNGSG

SEQ ID NO: 1523 - protein, 5 aa, synthetic construct
VNGSG

SEQ ID NO: 1524 - protein, 5 aa, synthetic construct
VNGSG

SEQ ID NO: 1525 - protein, 5 aa, synthetic construct
VNGSG

SEQ ID NO: 1526 - protein, 5 aa, synthetic construct
VNGSG

SEQ ID NO: 1527 - protein, 5 aa, synthetic construct
VNGSG

SEQ ID NO: 1528 - protein, 5 aa, synthetic construct
VNGSG

SEQ ID NO: 1529 - protein, 5 aa, synthetic construct
VNGSG

SEQ ID NO: 1530 - protein, 5 aa, synthetic construct
VNGSG

SEQ ID NO: 1531 - protein, 5 aa, synthetic construct
VNGSM

SEQ ID NO: 1532 - protein, 5 aa, synthetic construct
VNGSM

SEQ ID NO: 1533 - protein, 5 aa, synthetic construct
VNGSM

SEQ ID NO: 1534 - protein, 5 aa, synthetic construct
VNGSM

SEQ ID NO: 1535 - protein, 5 aa, synthetic construct
VNGSS

SEQ ID NO: 1536 - protein, 5 aa, synthetic construct
VNGSS

SEQ ID NO: 1537 - protein, 5 aa, synthetic construct
VNGSS

SEQ ID NO: 1538 - protein, 5 aa, synthetic construct
VNGSS

SEQ ID NO: 1539 - protein, 5 aa, synthetic construct
VNGSS

SEQ ID NO: 1540 - protein, 5 aa, synthetic construct
VNGSS

SEQ ID NO: 1541 - protein, 5 aa, synthetic construct
VNGST

SEQ ID NO: 1542 - protein, 5 aa, synthetic construct
VNGST

SEQ ID NO: 1543 - protein, 5 aa, synthetic construct
VNGST

SEQ ID NO: 1544 - protein, 5 aa, synthetic construct
VNGST

SEQ ID NO: 1545 - protein, 5 aa, synthetic construct
VNGST

SEQ ID NO: 1546 - protein, 5 aa, synthetic construct
VNGST

SEQ ID NO: 1547 - protein, 5 aa, synthetic construct
VNGST

SEQ ID NO: 1548 - protein, 5 aa, synthetic construct
VNGSV

SEQ ID NO: 1549 - protein, 5 aa, synthetic construct
VNGSV

SEQ ID NO: 1550 - protein, 5 aa, synthetic construct
VNGSV

SEQ ID NO: 1551 - protein, 5 aa, synthetic construct
VNGSV

SEQ ID NO: 1552 - protein, 5 aa, synthetic construct
VNSGM

SEQ ID NO: 1553 - protein, 5 aa, synthetic construct
VNSSA

SEQ ID NO: 1554 - protein, 5 aa, synthetic construct
VNSSA

SEQ ID NO: 1555 - protein, 5 aa, synthetic construct
VNSSA

SEQ ID NO: 1556 - protein, 5 aa, synthetic construct
VNSSA

SEQ ID NO: 1557 - protein, 5 aa, synthetic construct
VNSSA

SEQ ID NO: 1558 - protein, 5 aa, synthetic construct
VNSSA

SEQ ID NO: 1559 - protein, 5 aa, synthetic construct
VNSSG

SEQ ID NO: 1560 - protein, 5 aa, synthetic construct
VNSSG

SEQ ID NO: 1561 - protein, 5 aa, synthetic construct
VNSSG

SEQ ID NO: 1562 - protein, 5 aa, synthetic construct
VNSSG

SEQ ID NO: 1563 - protein, 5 aa, synthetic construct
VNSSG

SEQ ID NO: 1564 - protein, 5 aa, synthetic construct
VNSSG

SEQ ID NO: 1565 - protein, 5 aa, synthetic construct
VNSSM

SEQ ID NO: 1566 - protein, 5 aa, synthetic construct
VNSSM

SEQ ID NO: 1567 - protein, 5 aa, synthetic construct
VNSSM

SEQ ID NO: 1568 - protein, 5 aa, synthetic construct
VNSSM

SEQ ID NO: 1569 - protein, 5 aa, synthetic construct
VNSSS

SEQ ID NO: 1570 - protein, 5 aa, synthetic construct
VNSSS

SEQ ID NO: 1571 - protein, 5 aa, synthetic construct
VNSSS

SEQ ID NO: 1572 - protein, 5 aa, synthetic construct
VNSST

SEQ ID NO: 1573 - protein, 5 aa, synthetic construct
VNSST

SEQ ID NO: 1574 - protein, 5 aa, synthetic construct
VNSST

SEQ ID NO: 1575 - protein, 5 aa, synthetic construct
VNSST

SEQ ID NO: 1576 - protein, 5 aa, synthetic construct
VNSSV

SEQ ID NO: 1577 - protein, 5 aa, synthetic construct
VNSSV

SEQ ID NO: 1578 - protein, 5 aa, synthetic construct
VNSSV

SEQ ID NO: 1579 - protein, 5 aa, synthetic construct
VNTSA

SEQ ID NO: 1580 - protein, 5 aa, synthetic construct
VNTSG

SEQ ID NO: 1581 - protein, 5 aa, synthetic construct
VNTSG

SEQ ID NO: 1582 - protein, 5 aa, synthetic construct
VNTSG

SEQ ID NO: 1583 - protein, 5 aa, synthetic construct
VNTSG

SEQ ID NO: 1584 - protein, 5 aa, synthetic construct
VNTSG

SEQ ID NO: 1585 - protein, 5 aa, synthetic construct
VNTSG

SEQ ID NO: 1586 - protein, 5 aa, synthetic construct
VNTSG

SEQ ID NO: 1587 - protein, 5 aa, synthetic construct
VNTST

SEQ ID NO: 1588 - protein, 5 aa, synthetic construct
VNYPH

SEQ ID NO: 1589 - protein, 5 aa, synthetic construct
VNYSA

SEQ ID NO: 1590 - protein, 5 aa, synthetic construct
VNYSA

SEQ ID NO: 1591 - protein, 5 aa, synthetic construct
VNYSA

SEQ ID NO: 1592 - protein, 5 aa, synthetic construct
VNYSA

SEQ ID NO: 1593 - protein, 5 aa, synthetic construct
VNYSG

SEQ ID NO: 1594 - protein, 5 aa, synthetic construct
VNYSG

SEQ ID NO: 1595 - protein, 5 aa, synthetic construct
VNYSG

SEQ ID NO: 1596 - protein, 5 aa, synthetic construct
VNYSG

SEQ ID NO: 1597 - protein, 5 aa, synthetic construct
VNYSG

SEQ ID NO: 1598 - protein, 5 aa, synthetic construct
VNYSS

SEQ ID NO: 1599 - protein, 5 aa, synthetic construct
VNYSS

SEQ ID NO: 1600 - protein, 7 aa, synthetic construct
RGDRAAL

SEQ ID NO: 1601 - protein, 7 aa, synthetic construct
RGDRGSL

SEQ ID NO: 1602 - protein, 7 aa, synthetic construct
RGDRGYL

SEQ ID NO: 1603 - protein, 7 aa, synthetic construct
RGDRQAL

SEQ ID NO: 1604 - protein, 7 aa, synthetic construct
RGDRQSL

SEQ ID NO: 1605 - protein, 7 aa, synthetic construct
RGDRQYL

SEQ ID NO: 1606 - protein, 7 aa, synthetic construct
RGDRAAL

SEQ ID NO: 1607 - protein, 7 aa, synthetic construct
RGDRASL

SEQ ID NO: 1608 - protein, 7 aa, synthetic construct
RGDRAYL

SEQ ID NO: 1609 - protein, 7 aa, synthetic construct
RGDRGAL

SEQ ID NO: 1610 - protein, 7 aa, synthetic construct
RGDRGSL

SEQ ID NO: 1611 - protein, 7 aa, synthetic construct
RGDRGYL

SEQ ID NO: 1612 - protein, 7 aa, synthetic construct
RGDRQAL

SEQ ID NO: 1613 - protein, 7 aa, synthetic construct
RGDRQSL

SEQ ID NO: 1614 - protein, 7 aa, synthetic construct
RGDRQYL

SEQ ID NO: 1615 - protein, 7 aa, synthetic construct
RGDRAAL

SEQ ID NO: 1616 - protein, 7 aa, synthetic construct
RGDRASL

SEQ ID NO: 1617 - protein, 7 aa, synthetic construct
RGDRAYL

SEQ ID NO: 1618 - protein, 7 aa, synthetic construct
RGDRQAL

SEQ ID NO: 1619 - protein, 7 aa, synthetic construct
RGDRQSL

SEQ ID NO: 1620 - protein, 7 aa, synthetic construct
RGDRGSL

SEQ ID NO: 1621 - protein, 7 aa, synthetic construct
RGDRGYL

SEQ ID NO: 1622 - protein, 7 aa, synthetic construct
RGDRQAL

SEQ ID NO: 1623 - protein, 7 aa, synthetic construct
RGDRQSL

SEQ ID NO: 1624 - protein, 7 aa, synthetic construct
RGDRQYL

SEQ ID NO: 1625 - protein, 7 aa, synthetic construct
RGDRASL

SEQ ID NO: 1626 - protein, 7 aa, synthetic construct
RGDRAYL

SEQ ID NO: 1627 - protein, 7 aa, synthetic construct
RGDRGAL

SEQ ID NO: 1628 - protein, 7 aa, synthetic construct
RGDRGSL

SEQ ID NO: 1629 - protein, 7 aa, synthetic construct
RGDRGYL

SEQ ID NO: 1630 - protein, 7 aa, synthetic construct
RGDRQAL

SEQ ID NO: 1631 - protein, 7 aa, synthetic construct
RGDRQSL

SEQ ID NO: 1632 - protein, 7 aa, synthetic construct
RGDRQYL

SEQ ID NO: 1633 - protein, 7 aa, synthetic construct
RGDRASL

SEQ ID NO: 1634 - protein, 7 aa, synthetic construct
RGDRGYL

SEQ ID NO: 1635 - protein, 7 aa, synthetic construct
RGDRQAL

SEQ ID NO: 1636 - protein, 7 aa, synthetic construct
RGDRQSL

SEQ ID NO: 1637 - protein, 7 aa, synthetic construct
RGDRQYL

SEQ ID NO: 1638 - protein, 7 aa, synthetic construct
RGDRQNL

SEQ ID NO: 1639 - protein, 7 aa, synthetic construct
RGDRGML

SEQ ID NO: 1640 - protein, 7 aa, synthetic construct
RGDRAYL

SEQ ID NO: 1641 - protein, 7 aa, synthetic construct
RGDRGSL

SEQ ID NO: 1642 - protein, 7 aa, synthetic construct
RGDRGYL

SEQ ID NO: 1643 - protein, 7 aa, synthetic construct
RGDRQAL

SEQ ID NO: 1644 - protein, 7 aa, synthetic construct
RGDRQYL

SEQ ID NO: 1645 - protein, 7 aa, synthetic construct
RGDRAAL

SEQ ID NO: 1646 - protein, 7 aa, synthetic construct
RGDRAYL

SEQ ID NO: 1647 - protein, 7 aa, synthetic construct
RGDRGAL

SEQ ID NO: 1648 - protein, 7 aa, synthetic construct
RGDRGSL

SEQ ID NO: 1649 - protein, 7 aa, synthetic construct
RGDRGYL

SEQ ID NO: 1650 - protein, 7 aa, synthetic construct
RGDRQAL

SEQ ID NO: 1651 - protein, 7 aa, synthetic construct
RGDRQSL

SEQ ID NO: 1652 - protein, 7 aa, synthetic construct
RGDRQYL

SEQ ID NO: 1653 - protein, 7 aa, synthetic construct
RGDRGYL

SEQ ID NO: 1654 - protein, 7 aa, synthetic construct
RGDRQAL

SEQ ID NO: 1655 - protein, 7 aa, synthetic construct
RGDRQSL

SEQ ID NO: 1656 - protein, 7 aa, synthetic construct
RGDRQYL

SEQ ID NO: 1657 - protein, 7 aa, synthetic construct
RGDRAYL

SEQ ID NO: 1658 - protein, 7 aa, synthetic construct
RGDRGSL

SEQ ID NO: 1659 - protein, 7 aa, synthetic construct
RGDRGYL

SEQ ID NO: 1660 - protein, 7 aa, synthetic construct
RGDRQAL

SEQ ID NO: 1661 - protein, 7 aa, synthetic construct
RGDRQSL

SEQ ID NO: 1662 - protein, 7 aa, synthetic construct
RGDRQYL

SEQ ID NO: 1663 - protein, 7 aa, synthetic construct
RGDRAAL

SEQ ID NO: 1664 - protein, 7 aa, synthetic construct
RGDRAYL

SEQ ID NO: 1665 - protein, 7 aa, synthetic construct
RGDRGAL

SEQ ID NO: 1666 - protein, 7 aa, synthetic construct
RGDRGYL

SEQ ID NO: 1667 - protein, 7 aa, synthetic construct
RGDRQAL

SEQ ID NO: 1668 - protein, 7 aa, synthetic construct
RGDRQSL

SEQ ID NO: 1669 - protein, 7 aa, synthetic construct
RGDRQYL

SEQ ID NO: 1670 - protein, 7 aa, synthetic construct
RGDRAYL

SEQ ID NO: 1671 - protein, 7 aa, synthetic construct
RGDRGYL

SEQ ID NO: 1672 - protein, 7 aa, synthetic construct
RGDRQAL

SEQ ID NO: 1673 - protein, 7 aa, synthetic construct
RGDRQYL

SEQ ID NO: 1674 - protein, 7 aa, synthetic construct
RGDRGAL

SEQ ID NO: 1675 - protein, 7 aa, synthetic construct
RGDRGAL

SEQ ID NO: 1676 - protein, 7 aa, synthetic construct
RGDRGSL

SEQ ID NO: 1677 - protein, 7 aa, synthetic construct
RGDRGYL

SEQ ID NO: 1678 - protein, 7 aa, synthetic construct
RGDRQAL

SEQ ID NO: 1679 - protein, 7 aa, synthetic construct
RGDRQSL

SEQ ID NO: 1680 - protein, 7 aa, synthetic construct
RGDRQYL

SEQ ID NO: 1681 - protein, 7 aa, synthetic construct
RGDRAAL

SEQ ID NO: 1682 - protein, 7 aa, synthetic construct
RGDRASL

SEQ ID NO: 1683 - protein, 7 aa, synthetic construct
RGDRAYL

SEQ ID NO: 1684 - protein, 7 aa, synthetic construct
RGDRGAL

SEQ ID NO: 1685 - protein, 7 aa, synthetic construct
RGDRGSL

SEQ ID NO: 1686 - protein, 7 aa, synthetic construct
RGDRGYL

SEQ ID NO: 1687 - protein, 7 aa, synthetic construct
RGDRQAL

SEQ ID NO: 1688 - protein, 7 aa, synthetic construct
RGDRQSL

SEQ ID NO: 1689 - protein, 7 aa, synthetic construct
RGDRQYL

SEQ ID NO: 1690 - protein, 7 aa, synthetic construct
RGDRAYL

SEQ ID NO: 1691 - protein, 7 aa, synthetic construct
RGDRQAL

SEQ ID NO: 1692 - protein, 7 aa, synthetic construct
RGDRQSL

SEQ ID NO: 1693 - protein, 7 aa, synthetic construct
RGDRQYL

SEQ ID NO: 1694 - protein, 7 aa, synthetic construct
RGDRGSL

SEQ ID NO: 1695 - protein, 7 aa, synthetic construct
RGDRGYL

SEQ ID NO: 1696 - protein, 7 aa, synthetic construct
RGDRQAL

SEQ ID NO: 1697 - protein, 7 aa, synthetic construct
RGDRQSL

SEQ ID NO: 1698 - protein, 7 aa, synthetic construct
RGDRQYL

SEQ ID NO: 1699 - protein, 7 aa, synthetic construct
RGDRAAL

SEQ ID NO: 1700 - protein, 7 aa, synthetic construct
RGDRGSL

SEQ ID NO: 1701 - protein, 7 aa, synthetic construct
RGDRQAL

SEQ ID NO: 1702 - protein, 7 aa, synthetic construct
RGDRQSL

SEQ ID NO: 1703 - protein, 7 aa, synthetic construct
RGDRQYL

SEQ ID NO: 1704 - protein, 7 aa, synthetic construct
RGDRAYL

SEQ ID NO: 1705 - protein, 7 aa, synthetic construct
RGDRGYL

SEQ ID NO: 1706 - protein, 7 aa, synthetic construct
RGDRQAL

SEQ ID NO: 1707 - protein, 7 aa, synthetic construct
RGDRQSL

SEQ ID NO: 1708 - protein, 7 aa, synthetic construct
RGDRQYL

SEQ ID NO: 1709 - protein, 7 aa, synthetic construct
RGDRAYL

SEQ ID NO: 1710 - protein, 7 aa, synthetic construct
RGDRGAL

SEQ ID NO: 1711 - protein, 7 aa, synthetic construct
RGDRGSL

SEQ ID NO: 1712 - protein, 7 aa, synthetic construct
RGDRGYL

SEQ ID NO: 1713 - protein, 7 aa, synthetic construct
RGDRQAL

SEQ ID NO: 1714 - protein, 7 aa, synthetic construct
RGDRQYL

SEQ ID NO: 1715 - protein, 7 aa, synthetic construct
RGDRASL

SEQ ID NO: 1716 - protein, 7 aa, synthetic construct
RGDRGAL

SEQ ID NO: 1717 - protein, 7 aa, synthetic construct
RGDRGSL

SEQ ID NO: 1718 - protein, 7 aa, synthetic construct
RGDRGYL

SEQ ID NO: 1719 - protein, 7 aa, synthetic construct
RGDRQAL

SEQ ID NO: 1720 - protein, 7 aa, synthetic construct
RGDRQSL

SEQ ID NO: 1721 - protein, 7 aa, synthetic construct
RGDRQYL

SEQ ID NO: 1722 - protein, 7 aa, synthetic construct
RGDRAYL

SEQ ID NO: 1723 - protein, 7 aa, synthetic construct
RGDRQAL

SEQ ID NO: 1724 - protein, 7 aa, synthetic construct
RGDRQSL

SEQ ID NO: 1725 - protein, 7 aa, synthetic construct
RGDRQYL

SEQ ID NO: 1726 - protein, 7 aa, synthetic construct
RGDRGSL

SEQ ID NO: 1727 - protein, 7 aa, synthetic construct
RGDRQAL

SEQ ID NO: 1728 - protein, 7 aa, synthetic construct
RGDRQYL

SEQ ID NO: 1729 - protein, 7 aa, synthetic construct
RGDRAAL

SEQ ID NO: 1730 - protein, 7 aa, synthetic construct
RGDRQAL

SEQ ID NO: 1731 - protein, 7 aa, synthetic construct
RGDRQSL

SEQ ID NO: 1732 - protein, 7 aa, synthetic construct
RGDRQYL

SEQ ID NO: 1733 - protein, 7 aa, synthetic construct
RGDRAYL

SEQ ID NO: 1734 - protein, 7 aa, synthetic construct
RGDRGSL

SEQ ID NO: 1735 - protein, 7 aa, synthetic construct
RGDRQAL

SEQ ID NO: 1736 - protein, 7 aa, synthetic construct
RGDRQSL

SEQ ID NO: 1737 - protein, 7 aa, synthetic construct
RGDRQYL

SEQ ID NO: 1738 - protein, 7 aa, synthetic construct
RGDRGAL

SEQ ID NO: 1739 - protein, 7 aa, synthetic construct
RGDRAAL

SEQ ID NO: 1740 - protein, 7 aa, synthetic construct
RGDRASL

SEQ ID NO: 1741 - protein, 7 aa, synthetic construct
RGDRGAL

SEQ ID NO: 1742 - protein, 7 aa, synthetic construct
RGDRGSL

SEQ ID NO: 1743 - protein, 7 aa, synthetic construct
RGDRQAL

SEQ ID NO: 1744 - protein, 7 aa, synthetic construct
RGDRQSL

SEQ ID NO: 1745 - protein, 7 aa, synthetic construct
RGDRAAL

SEQ ID NO: 1746 - protein, 7 aa, synthetic construct
RGDRASL

SEQ ID NO: 1747 - protein, 7 aa, synthetic construct
RGDRGAL

SEQ ID NO: 1748 - protein, 7 aa, synthetic construct
RGDRGSL

SEQ ID NO: 1749 - protein, 7 aa, synthetic construct
RGDRQAL

SEQ ID NO: 1750 - protein, 7 aa, synthetic construct
RGDRQSL

SEQ ID NO: 1751 - protein, 7 aa, synthetic construct
RGDRQYL

SEQ ID NO: 1752 - protein, 7 aa, synthetic construct
RGDRAAL

SEQ ID NO: 1753 - protein, 7 aa, synthetic construct
RGDRASL

SEQ ID NO: 1754 - protein, 7 aa, synthetic construct
RGDRAYL

SEQ ID NO: 1755 - protein, 7 aa, synthetic construct
RGDRQAL

SEQ ID NO: 1756 - protein, 7 aa, synthetic construct
RGDRQSL

SEQ ID NO: 1757 - protein, 7 aa, synthetic construct
RGDRGAL

SEQ ID NO: 1758 - protein, 7 aa, synthetic construct
RGDRGSL

SEQ ID NO: 1759 - protein, 7 aa, synthetic construct
RGDRQAL

SEQ ID NO: 1760 - protein, 7 aa, synthetic construct
RGDRQSL

SEQ ID NO: 1761 - protein, 7 aa, synthetic construct
RGDRQYL

SEQ ID NO: 1762 - protein, 7 aa, synthetic construct
RGDRQAL

SEQ ID NO: 1763 - protein, 7 aa, synthetic construct
RGDRQSL

SEQ ID NO: 1764 - protein, 7 aa, synthetic construct
RGDRQYL

SEQ ID NO: 1765 - protein, 7 aa, synthetic construct
RGDRQAL

SEQ ID NO: 1766 - protein, 7 aa, synthetic construct
RGDRQSL

SEQ ID NO: 1767 - protein, 7 aa, synthetic construct
RGDRQYL

SEQ ID NO: 1768 - protein, 7 aa, synthetic construct
RGDRGAL

SEQ ID NO: 1769 - protein, 7 aa, synthetic construct
RGDRGAL

SEQ ID NO: 1770 - protein, 7 aa, synthetic construct
RGDRGAL

SEQ ID NO: 1771 - protein, 7 aa, synthetic construct
RGDRAAL

SEQ ID NO: 1772 - protein, 7 aa, synthetic construct
RGDRASL

SEQ ID NO: 1773 - protein, 7 aa, synthetic construct
RGDRAYL

SEQ ID NO: 1774 - protein, 7 aa, synthetic construct
RGDRGAL

SEQ ID NO: 1775 - protein, 7 aa, synthetic construct
RGDRGSL

SEQ ID NO: 1776 - protein, 7 aa, synthetic construct
RGDRGYL

SEQ ID NO: 1777 - protein, 7 aa, synthetic construct
RGDRQAL

SEQ ID NO: 1778 - protein, 7 aa, synthetic construct
RGDRQSL

SEQ ID NO: 1779 - protein, 7 aa, synthetic construct
RGDRQYL

SEQ ID NO: 1780 - protein, 7 aa, synthetic construct
RGDRAAL

SEQ ID NO: 1781 - protein, 7 aa, synthetic construct
RGDRASL

SEQ ID NO: 1782 - protein, 7 aa, synthetic construct
RGDRAYL

SEQ ID NO: 1783 - protein, 7 aa, synthetic construct
RGDRGAL

SEQ ID NO: 1784 - protein, 7 aa, synthetic construct
RGDRGSL

SEQ ID NO: 1785 - protein, 7 aa, synthetic construct
RGDRGYL

SEQ ID NO: 1786 - protein, 7 aa, synthetic construct
RGDRQAL

SEQ ID NO: 1787 - protein, 7 aa, synthetic construct
RGDRQSL

SEQ ID NO: 1788 - protein, 7 aa, synthetic construct
RGDRQYL

SEQ ID NO: 1789 - protein, 7 aa, synthetic construct
RGDRQLL

SEQ ID NO: 1790 - protein, 7 aa, synthetic construct
RGDRAAL

SEQ ID NO: 1791 - protein, 7 aa, synthetic construct
RGDRASL

SEQ ID NO: 1792 - protein, 7 aa, synthetic construct
RGDRAYL

SEQ ID NO: 1793 - protein, 7 aa, synthetic construct
RGDRGAL

SEQ ID NO: 1794 - protein, 7 aa, synthetic construct
RGDRGSL

SEQ ID NO: 1795 - protein, 7 aa, synthetic construct
RGDRGYL

SEQ ID NO: 1796 - protein, 7 aa, synthetic construct
RGDRQAL

SEQ ID NO: 1797 - protein, 7 aa, synthetic construct
RGDRQSL

SEQ ID NO: 1798 - protein, 7 aa, synthetic construct
RGDRQYL

SEQ ID NO: 1799 - protein, 7 aa, synthetic construct
RGDRAAL

SEQ ID NO: 1800 - protein, 7 aa, synthetic construct
RGDRASL

SEQ ID NO: 1801 - protein, 7 aa, synthetic construct
RGDRGAL

SEQ ID NO: 1802 - protein, 7 aa, synthetic construct
RGDRGSL

SEQ ID NO: 1803 - protein, 7 aa, synthetic construct
RGDRQAL

SEQ ID NO: 1804 - protein, 7 aa, synthetic construct
RGDRQSL

SEQ ID NO: 1805 - protein, 7 aa, synthetic construct
RGDRQYL

SEQ ID NO: 1806 - protein, 7 aa, synthetic construct
RGDRAAL

SEQ ID NO: 1807 - protein, 7 aa, synthetic construct
RGDRASL

SEQ ID NO: 1808 - protein, 7 aa, synthetic construct
RGDRGAL

SEQ ID NO: 1809 - protein, 7 aa, synthetic construct
RGDRGSL

SEQ ID NO: 1810 - protein, 7 aa, synthetic construct
RGDRGYL

SEQ ID NO: 1811 - protein, 7 aa, synthetic construct
RGDRQAL

SEQ ID NO: 1812 - protein, 7 aa, synthetic construct
RGDRQSL

SEQ ID NO: 1813 - protein, 7 aa, synthetic construct
RGDRQYL

SEQ ID NO: 1814 - protein, 7 aa, synthetic construct
RGDRAAL

SEQ ID NO: 1815 - protein, 7 aa, synthetic construct
RGDRASL

SEQ ID NO: 1816 - protein, 7 aa, synthetic construct
RGDRGAL

SEQ ID NO: 1817 - protein, 7 aa, synthetic construct
RGDRGSL

SEQ ID NO: 1818 - protein, 7 aa, synthetic construct
RGDRQAL

SEQ ID NO: 1819 - protein, 7 aa, synthetic construct
RGDRQSL

SEQ ID NO: 1820 - protein, 7 aa, synthetic construct
RGDRQYL

SEQ ID NO: 1821 - protein, 7 aa, synthetic construct
RGDRQNL

SEQ ID NO: 1822 - protein, 7 aa, synthetic construct
RGDRGML

SEQ ID NO: 1823 - protein, 7 aa, synthetic construct
RGDRAAL

SEQ ID NO: 1824 - protein, 7 aa, synthetic construct
RGDRAYL

SEQ ID NO: 1825 - protein, 7 aa, synthetic construct
RGDRGSL

SEQ ID NO: 1826 - protein, 7 aa, synthetic construct
RGDRGYL

SEQ ID NO: 1827 - protein, 7 aa, synthetic construct
RGDRQAL

SEQ ID NO: 1828 - protein, 7 aa, synthetic construct
RGDRQSL

SEQ ID NO: 1829 - protein, 7 aa, synthetic construct
RGDRQYL

SEQ ID NO: 1830 - protein, 7 aa, synthetic construct
RGDRAAL

SEQ ID NO: 1831 - protein, 7 aa, synthetic construct
RGDRAYL

SEQ ID NO: 1832 - protein, 7 aa, synthetic construct
RGDRGAL

SEQ ID NO: 1833 - protein, 7 aa, synthetic construct
RGDRGSL

SEQ ID NO: 1834 - protein, 7 aa, synthetic construct
RGDRGYL

SEQ ID NO: 1835 - protein, 7 aa, synthetic construct
RGDRQAL

SEQ ID NO: 1836 - protein, 7 aa, synthetic construct
RGDRQYL

SEQ ID NO: 1837 - protein, 7 aa, synthetic construct
RGDRASL

SEQ ID NO: 1838 - protein, 7 aa, synthetic construct
RGDRGYL

SEQ ID NO: 1839 - protein, 7 aa, synthetic construct
RGDRQAL

SEQ ID NO: 1840 - protein, 7 aa, synthetic construct
RGDRQSL

SEQ ID NO: 1841 - protein, 7 aa, synthetic construct
RGDRQYL

SEQ ID NO: 1842 - protein, 7 aa, synthetic construct
RGDRAAL

SEQ ID NO: 1843 - protein, 7 aa, synthetic construct
RGDRAYL

SEQ ID NO: 1844 - protein, 7 aa, synthetic construct
RGDRGAL

SEQ ID NO: 1845 - protein, 7 aa, synthetic construct
RGDRQYL

SEQ ID NO: 1846 - protein, 7 aa, synthetic construct
RGDRAAL

SEQ ID NO: 1847 - protein, 7 aa, synthetic construct
RGDRASL

SEQ ID NO: 1848 - protein, 7 aa, synthetic construct
RGDRAYL

SEQ ID NO: 1849 - protein, 7 aa, synthetic construct
RGDRGAL

SEQ ID NO: 1850 - protein, 7 aa, synthetic construct
RGDRGSL

SEQ ID NO: 1851 - protein, 7 aa, synthetic construct
RGDRGYL

SEQ ID NO: 1852 - protein, 7 aa, synthetic construct
RGDRQAL

SEQ ID NO: 1853 - protein, 7 aa, synthetic construct
RGDRQSL

SEQ ID NO: 1854 - protein, 7 aa, synthetic construct
RGDRQYL

SEQ ID NO: 1855 - protein, 7 aa, synthetic construct
RGDRASL

SEQ ID NO: 1856 - protein, 7 aa, synthetic construct
RGDRAYL

SEQ ID NO: 1857 - protein, 7 aa, synthetic construct
RGDRGYL

SEQ ID NO: 1858 - protein, 7 aa, synthetic construct
RGDRQAL

SEQ ID NO: 1859 - protein, 7 aa, synthetic construct
RGDRQSL

SEQ ID NO: 1860 - protein, 7 aa, synthetic construct
RGDRQYL

SEQ ID NO: 1861 - protein, 7 aa, synthetic construct
RGDRGAL

SEQ ID NO: 1862 - protein, 7 aa, synthetic construct
RGDRASL

SEQ ID NO: 1863 - protein, 7 aa, synthetic construct
RGDRAYL

SEQ ID NO: 1864 - protein, 7 aa, synthetic construct
RGDRGAL

SEQ ID NO: 1865 - protein, 7 aa, synthetic construct
RGDRGIL

SEQ ID NO: 1866 - protein, 7 aa, synthetic construct
RGDRGSL

SEQ ID NO: 1867 - protein, 7 aa, synthetic construct
RGDRGYL

SEQ ID NO: 1868 - protein, 7 aa, synthetic construct
RGDRQAL

SEQ ID NO: 1869 - protein, 7 aa, synthetic construct
RGDRQSL

SEQ ID NO: 1870 - protein, 7 aa, synthetic construct
RGDRQYL

SEQ ID NO: 1871 - protein, 7 aa, synthetic construct
RGDRAAL

SEQ ID NO: 1872 - protein, 7 aa, synthetic construct
RGDRASL

SEQ ID NO: 1873 - protein, 7 aa, synthetic construct
RGDRAYL

SEQ ID NO: 1874 - protein, 7 aa, synthetic construct
RGDRGAL

SEQ ID NO: 1875 - protein, 7 aa, synthetic construct
RGDRGSL

SEQ ID NO: 1876 - protein, 7 aa, synthetic construct
RGDRGYL

SEQ ID NO: 1877 - protein, 7 aa, synthetic construct
RGDRQAL

SEQ ID NO: 1878 - protein, 7 aa, synthetic construct
RGDRQSL

SEQ ID NO: 1879 - protein, 7 aa, synthetic construct
RGDRQYL

SEQ ID NO: 1880 - protein, 7 aa, synthetic construct
RGDRAAL

SEQ ID NO: 1881 - protein, 7 aa, synthetic construct
RGDRASL

SEQ ID NO: 1882 - protein, 7 aa, synthetic construct
RGDRAYL

SEQ ID NO: 1883 - protein, 7 aa, synthetic construct
RGDRGAL

SEQ ID NO: 1884 - protein, 7 aa, synthetic construct
RGDRGSL

SEQ ID NO: 1885 - protein, 7 aa, synthetic construct
RGDRQAL

SEQ ID NO: 1886 - protein, 7 aa, synthetic construct
RGDRQSL

SEQ ID NO: 1887 - protein, 7 aa, synthetic construct
RGDRQYL

SEQ ID NO: 1888 - protein, 7 aa, synthetic construct
RGDRAAL

SEQ ID NO: 1889 - protein, 7 aa, synthetic construct
RGDRGAL

SEQ ID NO: 1890 - protein, 7 aa, synthetic construct
RGDRGSL

SEQ ID NO: 1891 - protein, 7 aa, synthetic construct
RGDRQAL

SEQ ID NO: 1892 - protein, 7 aa, synthetic construct
RGDRQSL

SEQ ID NO: 1893 - protein, 7 aa, synthetic construct
RGDRQYL

SEQ ID NO: 1894 - protein, 7 aa, synthetic construct
RGDRAAL

SEQ ID NO: 1895 - protein, 7 aa, synthetic construct
RGDRASL

SEQ ID NO: 1896 - protein, 7 aa, synthetic construct
RGDRGAL

SEQ ID NO: 1897 - protein, 7 aa, synthetic construct
RGDRGSL

SEQ ID NO: 1898 - protein, 7 aa, synthetic construct
RGDRQAL

SEQ ID NO: 1899 - protein, 7 aa, synthetic construct
RGDRQSL

SEQ ID NO: 1900 - protein, 7 aa, synthetic construct
RGDRQYL

SEQ ID NO: 1901 - protein, 7 aa, synthetic construct
RGDRAAL

SEQ ID NO: 1902 - protein, 7 aa, synthetic construct
RGDRASL

SEQ ID NO: 1903 - protein, 7 aa, synthetic construct
RGDRGAL

SEQ ID NO: 1904 - protein, 7 aa, synthetic construct
RGDRGSL

SEQ ID NO: 1905 - protein, 7 aa, synthetic construct
RGDRGYL

SEQ ID NO: 1906 - protein, 7 aa, synthetic construct
RGDRQAL

SEQ ID NO: 1907 - protein, 7 aa, synthetic construct
RGDRQSL

SEQ ID NO: 1908 - protein, 7 aa, synthetic construct
RGDRQYL

SEQ ID NO: 1909 - protein, 7 aa, synthetic construct
RGDRAAL

SEQ ID NO: 1910 - protein, 7 aa, synthetic construct
RGDRASL

SEQ ID NO: 1911 - protein, 7 aa, synthetic construct
RGDRAYL

SEQ ID NO: 1912 - protein, 7 aa, synthetic construct
RGDRGAL

SEQ ID NO: 1913 - protein, 7 aa, synthetic construct
RGDRGSL

SEQ ID NO: 1914 - protein, 7 aa, synthetic construct
RGDRGYL

SEQ ID NO: 1915 - protein, 7 aa, synthetic construct
RGDRQAL

SEQ ID NO: 1916 - protein, 7 aa, synthetic construct
RGDRQSL

SEQ ID NO: 1917 - protein, 7 aa, synthetic construct
RGDRQYL

SEQ ID NO: 1918 - protein, 7 aa, synthetic construct
RGDRAAL

SEQ ID NO: 1919 - protein, 7 aa, synthetic construct
RGDRASL

SEQ ID NO: 1920 - protein, 7 aa, synthetic construct
RGDRAYL

SEQ ID NO: 1921 - protein, 7 aa, synthetic construct
RGDRGAL

SEQ ID NO: 1922 - protein, 7 aa, synthetic construct
RGDRGSL

SEQ ID NO: 1923 - protein, 7 aa, synthetic construct
RGDRGYL

SEQ ID NO: 1924 - protein, 7 aa, synthetic construct
RGDRQAL

SEQ ID NO: 1925 - protein, 7 aa, synthetic construct
RGDRQSL

SEQ ID NO: 1926 - protein, 7 aa, synthetic construct
RGDRQYL

SEQ ID NO: 1927 - protein, 7 aa, synthetic construct
RGDRAAL

SEQ ID NO: 1928 - protein, 7 aa, synthetic construct
RGDRASL

SEQ ID NO: 1929 - protein, 7 aa, synthetic construct
RGDRAYL

SEQ ID NO: 1930 - protein, 7 aa, synthetic construct
RGDRGAL

SEQ ID NO: 1931 - protein, 7 aa, synthetic construct
RGDRGSL

SEQ ID NO: 1932 - protein, 7 aa, synthetic construct
RGDRQAL

SEQ ID NO: 1933 - protein, 7 aa, synthetic construct
RGDRQSL

SEQ ID NO: 1934 - protein, 7 aa, synthetic construct
RGDRQYL

SEQ ID NO: 1935 - protein, 7 aa, synthetic construct
RGDRAAL

SEQ ID NO: 1936 - protein, 7 aa, synthetic construct
RGDRGSL

SEQ ID NO: 1937 - protein, 7 aa, synthetic construct
RGDRQAL

SEQ ID NO: 1938 - protein, 7 aa, synthetic construct
RGDRQSL

SEQ ID NO: 1939 - protein, 7 aa, synthetic construct
RGDRQYL

SEQ ID NO: 1940 - protein, 7 aa, synthetic construct
RGDRAAL

SEQ ID NO: 1941 - protein, 7 aa, synthetic construct
RGDRASL

SEQ ID NO: 1942 - protein, 7 aa, synthetic construct
RGDRGAL

SEQ ID NO: 1943 - protein, 7 aa, synthetic construct
RGDRGSL

SEQ ID NO: 1944 - protein, 7 aa, synthetic construct
RGDRQAL

SEQ ID NO: 1945 - protein, 7 aa, synthetic construct
RGDRQSL

SEQ ID NO: 1946 - protein, 7 aa, synthetic construct
RGDRQYL

SEQ ID NO: 1947 - protein, 7 aa, synthetic construct
RGDRAAL

SEQ ID NO: 1948 - protein, 7 aa, synthetic construct
RGDRASL

SEQ ID NO: 1949 - protein, 7 aa, synthetic construct
RGDRAYL

SEQ ID NO: 1950 - protein, 7 aa, synthetic construct
RGDRGAL

SEQ ID NO: 1951 - protein, 7 aa, synthetic construct
RGDRGSL

SEQ ID NO: 1952 - protein, 7 aa, synthetic construct
RGDRQAL

SEQ ID NO: 1953 - protein, 7 aa, synthetic construct
RGDRQSL

SEQ ID NO: 1954 - protein, 7 aa, synthetic construct
RGDRGAL

SEQ ID NO: 1955 - protein, 7 aa, synthetic construct
RGDRGAL

SEQ ID NO: 1956 - protein, 7 aa, synthetic construct
RGDRGSL

SEQ ID NO: 1957 - protein, 7 aa, synthetic construct
RGDRQAL

SEQ ID NO: 1958 - protein, 7 aa, synthetic construct
RGDRQSL

SEQ ID NO: 1959 - protein, 7 aa, synthetic construct
RGDRQYL

SEQ ID NO: 1960 - protein, 7 aa, synthetic construct
RGDRAAL

SEQ ID NO: 1961 - protein, 7 aa, synthetic construct
RGDRASL

SEQ ID NO: 1962 - protein, 7 aa, synthetic construct
RGDRGAL

SEQ ID NO: 1963 - protein, 7 aa, synthetic construct
RGDRGSL

SEQ ID NO: 1964 - protein, 7 aa, synthetic construct
RGDRQAL

SEQ ID NO: 1965 - protein, 7 aa, synthetic construct
RGDRQSL

SEQ ID NO: 1966 - protein, 7 aa, synthetic construct
RGDRQYL

SEQ ID NO: 1967 - protein, 7 aa, synthetic construct
RGDRQAL

SEQ ID NO: 1968 - protein, 7 aa, synthetic construct
RGDRQSL

SEQ ID NO: 1969 - protein, 7 aa, synthetic construct
RGDRGAL

SEQ ID NO: 1970 - protein, 7 aa, synthetic construct
RGDRGSL

SEQ ID NO: 1971 - protein, 7 aa, synthetic construct
RGDRQAL

SEQ ID NO: 1972 - protein, 7 aa, synthetic construct
RGDRQSL

SEQ ID NO: 1973 - protein, 7 aa, synthetic construct
RGDRQYL

SEQ ID NO: 1974 - protein, 7 aa, synthetic construct
RGDRASL

SEQ ID NO: 1975 - protein, 7 aa, synthetic construct
RGDRGAL

SEQ ID NO: 1976 - protein, 7 aa, synthetic construct
RGDRGSL

SEQ ID NO: 1977 - protein, 7 aa, synthetic construct
RGDRQAL

SEQ ID NO: 1978 - protein, 7 aa, synthetic construct
RGDRQSL

SEQ ID NO: 1979 - protein, 7 aa, synthetic construct
RGDRQYL

SEQ ID NO: 1980 - protein, 7 aa, synthetic construct
RGDRQAL

SEQ ID NO: 1981 - protein, 7 aa, synthetic construct
RGDRQSL

SEQ ID NO: 1982 - protein, 7 aa, synthetic construct
RGDRAAL

SEQ ID NO: 1983 - protein, 7 aa, synthetic construct
RGDRAYL

SEQ ID NO: 1984 - protein, 7 aa, synthetic construct
RGDRGSL

SEQ ID NO: 1985 - protein, 7 aa, synthetic construct
RGDRGYL

SEQ ID NO: 1986 - protein, 7 aa, synthetic construct
RGDRQAL

SEQ ID NO: 1987 - protein, 7 aa, synthetic construct
RGDRQSL

SEQ ID NO: 1988 - protein, 7 aa, synthetic construct
RGDRQYL

SEQ ID NO: 1989 - protein, 7 aa, synthetic construct
RGDRAAL

SEQ ID NO: 1990 - protein, 7 aa, synthetic construct
RGDRASL

SEQ ID NO: 1991 - protein, 7 aa, synthetic construct
RGDRAYL

SEQ ID NO: 1992 - protein, 7 aa, synthetic construct
RGDRGSL

SEQ ID NO: 1993 - protein, 7 aa, synthetic construct
RGDRQAL

SEQ ID NO: 1994 - protein, 7 aa, synthetic construct
RGDRQSL

SEQ ID NO: 1995 - protein, 7 aa, synthetic construct
RGDRQYL

SEQ ID NO: 1996 - protein, 7 aa, synthetic construct
RGDRQLL

SEQ ID NO: 1997 - protein, 7 aa, synthetic construct
RGDRAAL

SEQ ID NO: 1998 - protein, 7 aa, synthetic construct
RGDRAYL

SEQ ID NO: 1999 - protein, 7 aa, synthetic construct
RGDRGAL

SEQ ID NO: 2000 - protein, 7 aa, synthetic construct
RGDRQAL

SEQ ID NO: 2001 - protein, 7 aa, synthetic construct
RGDRQSL

SEQ ID NO: 2002 - protein, 7 aa, synthetic construct
RGDRAAL

SEQ ID NO: 2003 - protein, 7 aa, synthetic construct
RGDRAAL

SEQ ID NO: 2004 - protein, 7 aa, synthetic construct
RGDRASL

SEQ ID NO: 2005 - protein, 7 aa, synthetic construct
RGDRAYL

SEQ ID NO: 2006 - protein, 7 aa, synthetic construct
RGDRGAL

SEQ ID NO: 2007 - protein, 7 aa, synthetic construct
RGDRGSL

SEQ ID NO: 2008 - protein, 7 aa, synthetic construct
RGDRQAL

SEQ ID NO: 2009 - protein, 7 aa, synthetic construct
RGDRQSL

SEQ ID NO: 2010 - protein, 7 aa, synthetic construct
RGDRQYL

SEQ ID NO: 2011 - protein, 7 aa, synthetic construct
RGDRAAL

SEQ ID NO: 2012 - protein, 7 aa, synthetic construct
RGDRASL

SEQ ID NO: 2013 - protein, 7 aa, synthetic construct
RGDRAYL

SEQ ID NO: 2014 - protein, 7 aa, synthetic construct
RGDRQAL

SEQ ID NO: 2015 - protein, 7 aa, synthetic construct
RGDRQSL

SEQ ID NO: 2016 - protein, 7 aa, synthetic construct
RGDRQYL

SEQ ID NO: 2017 - protein, 7 aa, synthetic construct
RGDRQNL

SEQ ID NO: 2018 - protein, 7 aa, synthetic construct
RGDRAYL

SEQ ID NO: 2019 - protein, 7 aa, synthetic construct
RGDRGYL

SEQ ID NO: 2020 - protein, 7 aa, synthetic construct
RGDRQAL

SEQ ID NO: 2021 - protein, 7 aa, synthetic construct
RGDRQSL

SEQ ID NO: 2022 - protein, 7 aa, synthetic construct
RGDRQYL

SEQ ID NO: 2023 - protein, 7 aa, synthetic construct
RGDRAAL

SEQ ID NO: 2024 - protein, 7 aa, synthetic construct
RGDRAYL

SEQ ID NO: 2025 - protein, 7 aa, synthetic construct
RGDRGAL

SEQ ID NO: 2026 - protein, 7 aa, synthetic construct
RGDRGSL

SEQ ID NO: 2027 - protein, 7 aa, synthetic construct
RGDRGYL

SEQ ID NO: 2028 - protein, 7 aa, synthetic construct
RGDRQAL

SEQ ID NO: 2029 - protein, 7 aa, synthetic construct
RGDRQSL

SEQ ID NO: 2030 - protein, 7 aa, synthetic construct
RGDRQYL

SEQ ID NO: 2031 - protein, 7 aa, synthetic construct
RGDRQAL

SEQ ID NO: 2032 - protein, 7 aa, synthetic construct
RGDRQSL

SEQ ID NO: 2033 - protein, 7 aa, synthetic construct
RGDRQYL

SEQ ID NO: 2034 - protein, 7 aa, synthetic construct
RGDRQYL

SEQ ID NO: 2035 - protein, 7 aa, synthetic construct
RGDRAYL

SEQ ID NO: 2036 - protein, 7 aa, synthetic construct
RGDRGAL

SEQ ID NO: 2037 - protein, 7 aa, synthetic construct
RGDRGYL

SEQ ID NO: 2038 - protein, 7 aa, synthetic construct
RGDRQAL

SEQ ID NO: 2039 - protein, 7 aa, synthetic construct
RGDRQSL

SEQ ID NO: 2040 - protein, 7 aa, synthetic construct
RGDRQYL

SEQ ID NO: 2041 - protein, 7 aa, synthetic construct
RGDRGYL

SEQ ID NO: 2042 - protein, 7 aa, synthetic construct
RGDRQAL

SEQ ID NO: 2043 - protein, 7 aa, synthetic construct
RGDRQYL

SEQ ID NO: 2044 - protein, 7 aa, synthetic construct
RGDRGAL

SEQ ID NO: 2045 - protein, 7 aa, synthetic construct
RGDRAAL

SEQ ID NO: 2046 - protein, 7 aa, synthetic construct
RGDRAYL

SEQ ID NO: 2047 - protein, 7 aa, synthetic construct
RGDRGSL

SEQ ID NO: 2048 - protein, 7 aa, synthetic construct
RGDRGYL

SEQ ID NO: 2049 - protein, 7 aa, synthetic construct
RGDRQAL

SEQ ID NO: 2050 - protein, 7 aa, synthetic construct
RGDRQSL

SEQ ID NO: 2051 - protein, 7 aa, synthetic construct
RGDRQYL

SEQ ID NO: 2052 - protein, 7 aa, synthetic construct
RGDRAAL

SEQ ID NO: 2053 - protein, 7 aa, synthetic construct
RGDRASL

SEQ ID NO: 2054 - protein, 7 aa, synthetic construct
RGDRAYL

SEQ ID NO: 2055 - protein, 7 aa, synthetic construct
RGDRGAL

SEQ ID NO: 2056 - protein, 7 aa, synthetic construct
RGDRGSL

SEQ ID NO: 2057 - protein, 7 aa, synthetic construct
RGDRQAL

SEQ ID NO: 2058 - protein, 7 aa, synthetic construct
RGDRQSL

SEQ ID NO: 2059 - protein, 7 aa, synthetic construct
RGDRQYL

SEQ ID NO: 2060 - protein, 7 aa, synthetic construct
RGDRAAL

SEQ ID NO: 2061 - protein, 7 aa, synthetic construct
RGDRASL

SEQ ID NO: 2062 - protein, 7 aa, synthetic construct
RGDRAYL

SEQ ID NO: 2063 - protein, 7 aa, synthetic construct
RGDRGSL

SEQ ID NO: 2064 - protein, 7 aa, synthetic construct
RGDRQAL

SEQ ID NO: 2065 - protein, 7 aa, synthetic construct
RGDRQSL

SEQ ID NO: 2066 - protein, 7 aa, synthetic construct
RGDRQYL

SEQ ID NO: 2067 - protein, 7 aa, synthetic construct
RGDRAAL

SEQ ID NO: 2068 - protein, 7 aa, synthetic construct
RGDRAAL

SEQ ID NO: 2069 - protein, 7 aa, synthetic construct
RGDRASL

SEQ ID NO: 2070 - protein, 7 aa, synthetic construct
RGDRQAL

SEQ ID NO: 2071 - protein, 7 aa, synthetic construct
RGDRQSL

SEQ ID NO: 2072 - protein, 7 aa, synthetic construct
RGDRQYL

SEQ ID NO: 2073 - protein, 7 aa, synthetic construct
RGDRAAL

SEQ ID NO: 2074 - protein, 7 aa, synthetic construct
RGDRAYL

SEQ ID NO: 2075 - protein, 7 aa, synthetic construct
RGDRQAL

SEQ ID NO: 2076 - protein, 7 aa, synthetic construct
RGDRQSL

SEQ ID NO: 2077 - protein, 7 aa, synthetic construct
RGDRQYL

SEQ ID NO: 2078 - protein, 7 aa, synthetic construct
RGDRAYL

SEQ ID NO: 2079 - protein, 7 aa, synthetic construct
RGDRAAL

SEQ ID NO: 2080 - protein, 7 aa, synthetic construct
RGDRQAL

SEQ ID NO: 2081 - protein, 7 aa, synthetic construct
RGDRQYL

SEQ ID NO: 2082 - protein, 7 aa, synthetic construct
RGDRAYL

SEQ ID NO: 2083 - protein, 7 aa, synthetic construct
RGDRQYL

SEQ ID NO: 2084 - protein, 7 aa, synthetic construct
RGDRGAL

SEQ ID NO: 2085 - protein, 7 aa, synthetic construct
RGDRAAL

SEQ ID NO: 2086 - protein, 7 aa, synthetic construct
RGDRGYL

SEQ ID NO: 2087 - protein, 7 aa, synthetic construct
RGDRQAL

SEQ ID NO: 2088 - protein, 7 aa, synthetic construct
RGDRQSL

SEQ ID NO: 2089 - protein, 7 aa, synthetic construct
RGDRAAL

SEQ ID NO: 2090 - protein, 7 aa, synthetic construct
RGDRASL

SEQ ID NO: 2091 - protein, 7 aa, synthetic construct
RGDRGSL

SEQ ID NO: 2092 - protein, 7 aa, synthetic construct
RGDRQAL

SEQ ID NO: 2093 - protein, 7 aa, synthetic construct
RGDRQSL

SEQ ID NO: 2094 - protein, 7 aa, synthetic construct
RGDRQAL

SEQ ID NO: 2095 - protein, 7 aa, synthetic construct
RGDRAAL

SEQ ID NO: 2096 - protein, 7 aa, synthetic construct
RGDRQAL

SEQ ID NO: 2097 - protein, 7 aa, synthetic construct
RGDRQSL

SEQ ID NO: 2098 - protein, 7 aa, synthetic construct
RGDRQYL

SEQ ID NO: 2099 - protein, 7 aa, synthetic construct
RGDRGAL

SEQ ID NO: 2100 - protein, 7 aa, synthetic construct
RGDRGAL

SEQ ID NO: 2101 - protein, 7 aa, synthetic construct
RGDRAAL

SEQ ID NO: 2102 - protein, 7 aa, synthetic construct
RGDRASL

SEQ ID NO: 2103 - protein, 7 aa, synthetic construct
RGDRAYL

SEQ ID NO: 2104 - protein, 7 aa, synthetic construct
RGDRGAL

SEQ ID NO: 2105 - protein, 7 aa, synthetic construct
RGDRGSL

SEQ ID NO: 2106 - protein, 7 aa, synthetic construct
RGDRGYL

SEQ ID NO: 2107 - protein, 7 aa, synthetic construct
RGDRQAL

SEQ ID NO: 2108 - protein, 7 aa, synthetic construct
RGDRQSL

SEQ ID NO: 2109 - protein, 7 aa, synthetic construct
RGDRQYL

SEQ ID NO: 2110 - protein, 7 aa, synthetic construct
RGDRAAL

SEQ ID NO: 2111 - protein, 7 aa, synthetic construct
RGDRASL

SEQ ID NO: 2112 - protein, 7 aa, synthetic construct
RGDRAYL

SEQ ID NO: 2113 - protein, 7 aa, synthetic construct
RGDRGAL

SEQ ID NO: 2114 - protein, 7 aa, synthetic construct
RGDRGSL

SEQ ID NO: 2115 - protein, 7 aa, synthetic construct
RGDRGYL

SEQ ID NO: 2116 - protein, 7 aa, synthetic construct
RGDRQAL

SEQ ID NO: 2117 - protein, 7 aa, synthetic construct
RGDRQSL

SEQ ID NO: 2118 - protein, 7 aa, synthetic construct
RGDRQYL

SEQ ID NO: 2119 - protein, 7 aa, synthetic construct
RGDRQLL

SEQ ID NO: 2120 - protein, 7 aa, synthetic construct
RGDRAAL

SEQ ID NO: 2121 - protein, 7 aa, synthetic construct
RGDRASL

SEQ ID NO: 2122 - protein, 7 aa, synthetic construct
RGDRGAL

SEQ ID NO: 2123 - protein, 7 aa, synthetic construct
RGDRGSL

SEQ ID NO: 2124 - protein, 7 aa, synthetic construct
RGDRQAL

SEQ ID NO: 2125 - protein, 7 aa, synthetic construct
RGDRQSL

SEQ ID NO: 2126 - protein, 7 aa, synthetic construct
RGDRAAL

SEQ ID NO: 2127 - protein, 7 aa, synthetic construct
RGDRASL

SEQ ID NO: 2128 - protein, 7 aa, synthetic construct
RGDRAYL

SEQ ID NO: 2129 - protein, 7 aa, synthetic construct
RGDRGAL

SEQ ID NO: 2130 - protein, 7 aa, synthetic construct
RGDRGSL

SEQ ID NO: 2131 - protein, 7 aa, synthetic construct
RGDRQAL

SEQ ID NO: 2132 - protein, 7 aa, synthetic construct
RGDRQSL

SEQ ID NO: 2133 - protein, 7 aa, synthetic construct
RGDRQYL

SEQ ID NO: 2134 - protein, 7 aa, synthetic construct
RGDRAAL

SEQ ID NO: 2135 - protein, 7 aa, synthetic construct
RGDRASL

SEQ ID NO: 2136 - protein, 7 aa, synthetic construct
RGDRAYL

SEQ ID NO: 2137 - protein, 7 aa, synthetic construct
RGDRGAL

SEQ ID NO: 2138 - protein, 7 aa, synthetic construct
RGDRGSL

SEQ ID NO: 2139 - protein, 7 aa, synthetic construct
RGDRGYL

SEQ ID NO: 2140 - protein, 7 aa, synthetic construct
RGDRQAL

SEQ ID NO: 2141 - protein, 7 aa, synthetic construct
RGDRQSL

SEQ ID NO: 2142 - protein, 7 aa, synthetic construct
RGDRQYL

SEQ ID NO: 2143 - protein, 7 aa, synthetic construct
RGDRAAL

SEQ ID NO: 2144 - protein, 7 aa, synthetic construct
RGDRASL

SEQ ID NO: 2145 - protein, 7 aa, synthetic construct
RGDRAYL

SEQ ID NO: 2146 - protein, 7 aa, synthetic construct
RGDRGSL

SEQ ID NO: 2147 - protein, 7 aa, synthetic construct
RGDRGYL

SEQ ID NO: 2148 - protein, 7 aa, synthetic construct
RGDRQAL

SEQ ID NO: 2149 - protein, 7 aa, synthetic construct
RGDRQSL

SEQ ID NO: 2150 - protein, 7 aa, synthetic construct
RGDRQYL

SEQ ID NO: 2151 - protein, 7 aa, synthetic construct
RGDRQNL

SEQ ID NO: 2152 - protein, 7 aa, synthetic construct
RGDRGML

SEQ ID NO: 2153 - protein, 7 aa, synthetic construct
RGDRGYL

SEQ ID NO: 2154 - protein, 7 aa, synthetic construct
RGDRQAL

SEQ ID NO: 2155 - protein, 7 aa, synthetic construct
RGDRQSL

SEQ ID NO: 2156 - protein, 7 aa, synthetic construct
RGDRQYL

SEQ ID NO: 2157 - protein, 7 aa, synthetic construct
RGDRASL

SEQ ID NO: 2158 - protein, 7 aa, synthetic construct
RGDRAYL

SEQ ID NO: 2159 - protein, 7 aa, synthetic construct
RGDRGAL

SEQ ID NO: 2160 - protein, 7 aa, synthetic construct
RGDRGSL

SEQ ID NO: 2161 - protein, 7 aa, synthetic construct
RGDRGYL

SEQ ID NO: 2162 - protein, 7 aa, synthetic construct
RGDRQAL

SEQ ID NO: 2163 - protein, 7 aa, synthetic construct
RGDRQSL

SEQ ID NO: 2164 - protein, 7 aa, synthetic construct
RGDRQYL

SEQ ID NO: 2165 - protein, 7 aa, synthetic construct
RGDRAYL

SEQ ID NO: 2166 - protein, 7 aa, synthetic construct
RGDRGYL

SEQ ID NO: 2167 - protein, 7 aa, synthetic construct
RGDRQAL

SEQ ID NO: 2168 - protein, 7 aa, synthetic construct
RGDRQSL

SEQ ID NO: 2169 - protein, 7 aa, synthetic construct
RGDRQYL

SEQ ID NO: 2170 - protein, 7 aa, synthetic construct
RGDRGYL

SEQ ID NO: 2171 - protein, 7 aa, synthetic construct
RGDRQYL

SEQ ID NO: 2172 - protein, 7 aa, synthetic construct
RGDRAAL

SEQ ID NO: 2173 - protein, 7 aa, synthetic construct
RGDRASL

SEQ ID NO: 2174 - protein, 7 aa, synthetic construct
RGDRGAL

SEQ ID NO: 2175 - protein, 7 aa, synthetic construct
RGDRGYL

SEQ ID NO: 2176 - protein, 7 aa, synthetic construct
RGDRQAL

SEQ ID NO: 2177 - protein, 7 aa, synthetic construct
RGDRQSL

SEQ ID NO: 2178 - protein, 7 aa, synthetic construct
RGDRQYL

SEQ ID NO: 2179 - protein, 7 aa, synthetic construct
RGDRGYL

SEQ ID NO: 2180 - protein, 7 aa, synthetic construct
RGDRQAL

SEQ ID NO: 2181 - protein, 7 aa, synthetic construct
RGDRQSL

SEQ ID NO: 2182 - protein, 7 aa, synthetic construct
RGDRQYL

SEQ ID NO: 2183 - protein, 7 aa, synthetic construct
RGDRGAL

SEQ ID NO: 2184 - protein, 7 aa, synthetic construct
RGDRAYL

SEQ ID NO: 2185 - protein, 7 aa, synthetic construct
RGDRGAL

SEQ ID NO: 2186 - protein, 7 aa, synthetic construct
RGDRGIL

SEQ ID NO: 2187 - protein, 7 aa, synthetic construct
RGDRGSL

SEQ ID NO: 2188 - protein, 7 aa, synthetic construct
RGDRGYL

SEQ ID NO: 2189 - protein, 7 aa, synthetic construct
RGDRQAL

SEQ ID NO: 2190 - protein, 7 aa, synthetic construct
RGDRQSL

SEQ ID NO: 2191 - protein, 7 aa, synthetic construct
RGDRQYL

SEQ ID NO: 2192 - protein, 7 aa, synthetic construct
RGDRAAL

SEQ ID NO: 2193 - protein, 7 aa, synthetic construct
RGDRAYL

SEQ ID NO: 2194 - protein, 7 aa, synthetic construct
RGDRGAL

SEQ ID NO: 2195 - protein, 7 aa, synthetic construct
RGDRGSL

SEQ ID NO: 2196 - protein, 7 aa, synthetic construct
RGDRGYL

SEQ ID NO: 2197 - protein, 7 aa, synthetic construct
RGDRQAL

SEQ ID NO: 2198 - protein, 7 aa, synthetic construct
RGDRQSL

SEQ ID NO: 2199 - protein, 7 aa, synthetic construct
RGDRQYL

SEQ ID NO: 2200 - protein, 7 aa, synthetic construct
RGDRAAL

SEQ ID NO: 2201 - protein, 7 aa, synthetic construct
RGDRASL

SEQ ID NO: 2202 - protein, 7 aa, synthetic construct
RGDRAYL

SEQ ID NO: 2203 - protein, 7 aa, synthetic construct
RGDRGSL

SEQ ID NO: 2204 - protein, 7 aa, synthetic construct
RGDRQAL

SEQ ID NO: 2205 - protein, 7 aa, synthetic construct
RGDRQSL

SEQ ID NO: 2206 - protein, 7 aa, synthetic construct
RGDRQYL

SEQ ID NO: 2207 - protein, 7 aa, synthetic construct
RGDRAAL

SEQ ID NO: 2208 - protein, 7 aa, synthetic construct
RGDRGSL

SEQ ID NO: 2209 - protein, 7 aa, synthetic construct
RGDRQAL

SEQ ID NO: 2210 - protein, 7 aa, synthetic construct
RGDRQSL

SEQ ID NO: 2211 - protein, 7 aa, synthetic construct
RGDRQYL

SEQ ID NO: 2212 - protein, 7 aa, synthetic construct
RGDRAAL

SEQ ID NO: 2213 - protein, 7 aa, synthetic construct
RGDRASL

SEQ ID NO: 2214 - protein, 7 aa, synthetic construct
RGDRGSL

SEQ ID NO: 2215 - protein, 7 aa, synthetic construct
RGDRGYL

SEQ ID NO: 2216 - protein, 7 aa, synthetic construct
RGDRQAL

SEQ ID NO: 2217 - protein, 7 aa, synthetic construct
RGDRQSL

SEQ ID NO: 2218 - protein, 7 aa, synthetic construct
RGDRQYL

SEQ ID NO: 2219 - protein, 7 aa, synthetic construct
RGDRQAL

SEQ ID NO: 2220 - protein, 7 aa, synthetic construct
RGDRQSL

SEQ ID NO: 2221 - protein, 7 aa, synthetic construct
RGDRQYL

SEQ ID NO: 2222 - protein, 7 aa, synthetic construct
RGDRAAL

SEQ ID NO: 2223 - protein, 7 aa, synthetic construct
RGDRGAL

SEQ ID NO: 2224 - protein, 7 aa, synthetic construct
RGDRGSL

SEQ ID NO: 2225 - protein, 7 aa, synthetic construct
RGDRGYL

SEQ ID NO: 2226 - protein, 7 aa, synthetic construct
RGDRQAL

SEQ ID NO: 2227 - protein, 7 aa, synthetic construct
RGDRQSL

SEQ ID NO: 2228 - protein, 7 aa, synthetic construct
RGDRQYL

SEQ ID NO: 2229 - protein, 7 aa, synthetic construct
RGDRAAL

SEQ ID NO: 2230 - protein, 7 aa, synthetic construct
RGDRASL

SEQ ID NO: 2231 - protein, 7 aa, synthetic construct
RGDRGAL

SEQ ID NO: 2232 - protein, 7 aa, synthetic construct
RGDRGSL

SEQ ID NO: 2233 - protein, 7 aa, synthetic construct
RGDRGYL

SEQ ID NO: 2234 - protein, 7 aa, synthetic construct
RGDRQAL

SEQ ID NO: 2235 - protein, 7 aa, synthetic construct
RGDRQSL

SEQ ID NO: 2236 - protein, 7 aa, synthetic construct
RGDRQYL

SEQ ID NO: 2237 - protein, 7 aa, synthetic construct
RGDRAYL

SEQ ID NO: 2238 - protein, 7 aa, synthetic construct
RGDRGSL

SEQ ID NO: 2239 - protein, 7 aa, synthetic construct
RGDRQAL

SEQ ID NO: 2240 - protein, 7 aa, synthetic construct
RGDRQSL

SEQ ID NO: 2241 - protein, 7 aa, synthetic construct
RGDRQAL

SEQ ID NO: 2242 - protein, 7 aa, synthetic construct
RGDRQAL

SEQ ID NO: 2243 - protein, 7 aa, synthetic construct
RGDRQSL

SEQ ID NO: 2244 - protein, 7 aa, synthetic construct
RGDRQYL

SEQ ID NO: 2245 - protein, 7 aa, synthetic construct
RGDRAYL

SEQ ID NO: 2246 - protein, 7 aa, synthetic construct
RGDRQAL

SEQ ID NO: 2247 - protein, 7 aa, synthetic construct
RGDRQSL

SEQ ID NO: 2248 - protein, 7 aa, synthetic construct
RGDRQYL

SEQ ID NO: 2249 - protein, 7 aa, synthetic construct
RGDRGAL

SEQ ID NO: 2250 - protein, 7 aa, synthetic construct
RGDRAAL

SEQ ID NO: 2251 - protein, 7 aa, synthetic construct
RGDRASL

SEQ ID NO: 2252 - protein, 7 aa, synthetic construct
RGDRGAL

SEQ ID NO: 2253 - protein, 7 aa, synthetic construct
RGDRGSL

SEQ ID NO: 2254 - protein, 7 aa, synthetic construct
RGDRQAL

SEQ ID NO: 2255 - protein, 7 aa, synthetic construct
RGDRQSL

SEQ ID NO: 2256 - protein, 7 aa, synthetic construct
RGDRQYL

SEQ ID NO: 2257 - protein, 7 aa, synthetic construct
RGDRAAL

SEQ ID NO: 2258 - protein, 7 aa, synthetic construct
RGDRGAL

SEQ ID NO: 2259 - protein, 7 aa, synthetic construct
RGDRGSL

SEQ ID NO: 2260 - protein, 7 aa, synthetic construct
RGDRQAL

SEQ ID NO: 2261 - protein, 7 aa, synthetic construct
RGDRQSL

SEQ ID NO: 2262 - protein, 7 aa, synthetic construct
RGDRAAL

SEQ ID NO: 2263 - protein, 7 aa, synthetic construct
RGDRASL

SEQ ID NO: 2264 - protein, 7 aa, synthetic construct
RGDRGSL

SEQ ID NO: 2265 - protein, 7 aa, synthetic construct
RGDRQAL

SEQ ID NO: 2266 - protein, 7 aa, synthetic construct
RGDRQSL

SEQ ID NO: 2267 - protein, 7 aa, synthetic construct
RGDRGAL

SEQ ID NO: 2268 - protein, 7 aa, synthetic construct
RGDRGSL

SEQ ID NO: 2269 - protein, 7 aa, synthetic construct
RGDRQAL

SEQ ID NO: 2270 - protein, 7 aa, synthetic construct
RGDRQSL

SEQ ID NO: 2271 - protein, 7 aa, synthetic construct
RGDRAAL

SEQ ID NO: 2272 - protein, 7 aa, synthetic construct
RGDRGAL

SEQ ID NO: 2273 - protein, 7 aa, synthetic construct
RGDRGSL

SEQ ID NO: 2274 - protein, 7 aa, synthetic construct
RGDRQAL

SEQ ID NO: 2275 - protein, 7 aa, synthetic construct
RGDRQSL

SEQ ID NO: 2276 - protein, 7 aa, synthetic construct
RGDRQYL

SEQ ID NO: 2277 - protein, 7 aa, synthetic construct
RGDRQAL

SEQ ID NO: 2278 - protein, 7 aa, synthetic construct
RGDRQSL

SEQ ID NO: 2279 - protein, 7 aa, synthetic construct
RGDRQYL

SEQ ID NO: 2280 - protein, 7 aa, synthetic construct
RGDRGAL

SEQ ID NO: 2281 - protein, 7 aa, synthetic construct
RGDRAAL

SEQ ID NO: 2282 - protein, 7 aa, synthetic construct
RGDRGAL

SEQ ID NO: 2283 - protein, 7 aa, synthetic construct
RGDRGSL

SEQ ID NO: 2284 - protein, 7 aa, synthetic construct
RGDRGYL

SEQ ID NO: 2285 - protein, 7 aa, synthetic construct
RGDRQAL

SEQ ID NO: 2286 - protein, 7 aa, synthetic construct
RGDRQYL

SEQ ID NO: 2287 - protein, 7 aa, synthetic construct
RGDRAAL

SEQ ID NO: 2288 - protein, 7 aa, synthetic construct
RGDRAYL

SEQ ID NO: 2289 - protein, 7 aa, synthetic construct
RGDRGAL

SEQ ID NO: 2290 - protein, 7 aa, synthetic construct
RGDRGSL

SEQ ID NO: 2291 - protein, 7 aa, synthetic construct
RGDRGYL

SEQ ID NO: 2292 - protein, 7 aa, synthetic construct
RGDRQAL

SEQ ID NO: 2293 - protein, 7 aa, synthetic construct
RGDRQYL

SEQ ID NO: 2294 - protein, 7 aa, synthetic construct
RGDRAYL

SEQ ID NO: 2295 - protein, 7 aa, synthetic construct
RGDRQAL

SEQ ID NO: 2296 - protein, 7 aa, synthetic construct
RGDRQSL

SEQ ID NO: 2297 - protein, 7 aa, synthetic construct
RGDRGSL

SEQ ID NO: 2298 - protein, 7 aa, synthetic construct
RGDRQAL

SEQ ID NO: 2299 - protein, 7 aa, synthetic construct
RGDRQYL

SEQ ID NO: 2300 - protein, 7 aa, synthetic construct
RGDRAAL

SEQ ID NO: 2301 - protein, 7 aa, synthetic construct
RGDRGAL

SEQ ID NO: 2302 - protein, 7 aa, synthetic construct
RGDRGSL

SEQ ID NO: 2303 - protein, 7 aa, synthetic construct
RGDRGYL

SEQ ID NO: 2304 - protein, 7 aa, synthetic construct
RGDRQAL

SEQ ID NO: 2305 - protein, 7 aa, synthetic construct
RGDRQSL

SEQ ID NO: 2306 - protein, 7 aa, synthetic construct
RGDRQYL

SEQ ID NO: 2307 - protein, 7 aa, synthetic construct
RGDRGSL

SEQ ID NO: 2308 - protein, 7 aa, synthetic construct
RGDRGYL

SEQ ID NO: 2309 - protein, 7 aa, synthetic construct
RGDRQAL

SEQ ID NO: 2310 - protein, 7 aa, synthetic construct
RGDRQSL

SEQ ID NO: 2311 - protein, 7 aa, synthetic construct
RGDRQYL

SEQ ID NO: 2312 - protein, 7 aa, synthetic construct
RGDRQNL

SEQ ID NO: 2313 - protein, 7 aa, synthetic construct
RGDRGML

SEQ ID NO: 2314 - protein, 7 aa, synthetic construct
RGDRAYL

SEQ ID NO: 2315 - protein, 7 aa, synthetic construct
RGDRGAL

SEQ ID NO: 2316 - protein, 7 aa, synthetic construct
RGDRGSL

SEQ ID NO: 2317 - protein, 7 aa, synthetic construct
RGDRGYL

SEQ ID NO: 2318 - protein, 7 aa, synthetic construct
RGDRQAL

SEQ ID NO: 2319 - protein, 7 aa, synthetic construct
RGDRQSL

SEQ ID NO: 2320 - protein, 7 aa, synthetic construct
RGDRQYL

SEQ ID NO: 2321 - protein, 7 aa, synthetic construct
RGDRAAL

SEQ ID NO: 2322 - protein, 7 aa, synthetic construct
RGDRASL

SEQ ID NO: 2323 - protein, 7 aa, synthetic construct
RGDRAYL

SEQ ID NO: 2324 - protein, 7 aa, synthetic construct
RGDRGAL

SEQ ID NO: 2325 - protein, 7 aa, synthetic construct
RGDRGSL

SEQ ID NO: 2326 - protein, 7 aa, synthetic construct
RGDRGYL

SEQ ID NO: 2327 - protein, 7 aa, synthetic construct
RGDRQAL

SEQ ID NO: 2328 - protein, 7 aa, synthetic construct
RGDRQSL

SEQ ID NO: 2329 - protein, 7 aa, synthetic construct
RGDRQYL

SEQ ID NO: 2330 - protein, 7 aa, synthetic construct
RGDRGYL

SEQ ID NO: 2331 - protein, 7 aa, synthetic construct
RGDRQAL

SEQ ID NO: 2332 - protein, 7 aa, synthetic construct
RGDRQSL

SEQ ID NO: 2333 - protein, 7 aa, synthetic construct
RGDRQYL

SEQ ID NO: 2334 - protein, 7 aa, synthetic construct
RGDRAYL

SEQ ID NO: 2335 - protein, 7 aa, synthetic construct
RGDRGAL

SEQ ID NO: 2336 - protein, 7 aa, synthetic construct
RGDRGSL

SEQ ID NO: 2337 - protein, 7 aa, synthetic construct
RGDRQAL

SEQ ID NO: 2338 - protein, 7 aa, synthetic construct
RGDRQSL

SEQ ID NO: 2339 - protein, 7 aa, synthetic construct
RGDRQYL

SEQ ID NO: 2340 - protein, 7 aa, synthetic construct
RGDRAAL

SEQ ID NO: 2341 - protein, 7 aa, synthetic construct
RGDRAYL

SEQ ID NO: 2342 - protein, 7 aa, synthetic construct
RGDRGAL

SEQ ID NO: 2343 - protein, 7 aa, synthetic construct
RGDRGYL

SEQ ID NO: 2344 - protein, 7 aa, synthetic construct
RGDRQAL

SEQ ID NO: 2345 - protein, 7 aa, synthetic construct
RGDRQSL

SEQ ID NO: 2346 - protein, 7 aa, synthetic construct
RGDRQYL

SEQ ID NO: 2347 - protein, 7 aa, synthetic construct
RGDRAYL

SEQ ID NO: 2348 - protein, 7 aa, synthetic construct
RGDRQAL

SEQ ID NO: 2349 - protein, 7 aa, synthetic construct
RGDRQSL

SEQ ID NO: 2350 - protein, 7 aa, synthetic construct
RGDRQYL

SEQ ID NO: 2351 - protein, 7 aa, synthetic construct
RGDRGAL

SEQ ID NO: 2352 - protein, 7 aa, synthetic construct
RGDRGAL

SEQ ID NO: 2353 - protein, 7 aa, synthetic construct
RGDRGSL

SEQ ID NO: 2354 - protein, 7 aa, synthetic construct
RGDRGYL

SEQ ID NO: 2355 - protein, 7 aa, synthetic construct
RGDRQAL

SEQ ID NO: 2356 - protein, 7 aa, synthetic construct
RGDRQSL

SEQ ID NO: 2357 - protein, 7 aa, synthetic construct
RGDRQYL

SEQ ID NO: 2358 - protein, 7 aa, synthetic construct
RGDRAAL

SEQ ID NO: 2359 - protein, 7 aa, synthetic construct
RGDRAYL

SEQ ID NO: 2360 - protein, 7 aa, synthetic construct
RGDRGAL

SEQ ID NO: 2361 - protein, 7 aa, synthetic construct
RGDRQAL

SEQ ID NO: 2362 - protein, 7 aa, synthetic construct
RGDRQSL

SEQ ID NO: 2363 - protein, 7 aa, synthetic construct
RGDRQYL

SEQ ID NO: 2364 - protein, 7 aa, synthetic construct
RGDRAYL

SEQ ID NO: 2365 - protein, 7 aa, synthetic construct
RGDRQAL

SEQ ID NO: 2366 - protein, 7 aa, synthetic construct
RGDRQSL

SEQ ID NO: 2367 - protein, 7 aa, synthetic construct
RGDRQYL

SEQ ID NO: 2368 - protein, 7 aa, synthetic construct
RGDRGSL

SEQ ID NO: 2369 - protein, 7 aa, synthetic construct
RGDRQAL

SEQ ID NO: 2370 - protein, 7 aa, synthetic construct
RGDRQSL

SEQ ID NO: 2371 - protein, 7 aa, synthetic construct
RGDRGAL

SEQ ID NO: 2372 - protein, 7 aa, synthetic construct
RGDRQAL

SEQ ID NO: 2373 - protein, 7 aa, synthetic construct
RGDRQSL

SEQ ID NO: 2374 - protein, 7 aa, synthetic construct
RGDRQYL

SEQ ID NO: 2375 - protein, 7 aa, synthetic construct
RGDRAYL

SEQ ID NO: 2376 - protein, 7 aa, synthetic construct
RGDRQAL

SEQ ID NO: 2377 - protein, 7 aa, synthetic construct
RGDRQSL

SEQ ID NO: 2378 - protein, 7 aa, synthetic construct
RGDRAYL

SEQ ID NO: 2379 - protein, 7 aa, synthetic construct
RGDRAAL

SEQ ID NO: 2380 - protein, 7 aa, synthetic construct
RGDRGAL

SEQ ID NO: 2381 - protein, 7 aa, synthetic construct
RGDRGSL

SEQ ID NO: 2382 - protein, 7 aa, synthetic construct
RGDRGYL

SEQ ID NO: 2383 - protein, 7 aa, synthetic construct
RGDRQAL

SEQ ID NO: 2384 - protein, 7 aa, synthetic construct
RGDRQSL

SEQ ID NO: 2385 - protein, 7 aa, synthetic construct
RGDRQYL

SEQ ID NO: 2386 - protein, 7 aa, synthetic construct
RGDRAYL

SEQ ID NO: 2387 - protein, 7 aa, synthetic construct
RGDRGAL

SEQ ID NO: 2388 - protein, 7 aa, synthetic construct
RGDRGAL

SEQ ID NO: 2389 - protein, 7 aa, synthetic construct
RGDRGSL

SEQ ID NO: 2390 - protein, 7 aa, synthetic construct
RGDRQAL

SEQ ID NO: 2391 - protein, 7 aa, synthetic construct
RGDRQSL

SEQ ID NO: 2392 - protein, 7 aa, synthetic construct
RGDRAAL

SEQ ID NO: 2393 - protein, 7 aa, synthetic construct
RGDRGAL

SEQ ID NO: 2394 - protein, 7 aa, synthetic construct
RGDRQAL

SEQ ID NO: 2395 - protein, 7 aa, synthetic construct
RGDRQSL

SEQ ID NO: 2396 - protein, 7 aa, synthetic construct
RGDRQYL

SEQ ID NO: 2397 - protein, 7 aa, synthetic construct
RGDRGSL

SEQ ID NO: 2398 - protein, 7 aa, synthetic construct
RGDRGYL
